(19) United States
(12) Patent Application Publication
(10) Pub. No.: US 2013/0136748 A1
(43) Pub. Date: May 30, 2013

(54) BIOLOGICAL MATERIALS RELATED TO HER3

(71) Applicants: Christine Knuehl, Darmstadt (DE); Bjoern Hock, Maintal (DE); Robert Hofmeister, Scituate, MA (US); Gerald Beste, Gent (BE); Hilde Adi Pierrette Revets, Meise (BE); Frank Kamiel Delphina Verdonck, Sint-Gillis-Waas (BE); Sigrid Godelieve Victor Cornelis, Sint-Martens-Latem (BE)

(72) Inventors: Christine Knuehl, Darmstadt (DE); Bjoern Hock, Maintal (DE); Robert Hofmeister, Scituate, MA (US); Gerald Beste, Gent (BE); Hilde Adi Pierrette Revets, Meise (BE); Frank Kamiel Delphina Verdonck, Sint-Gillis-Waas (BE); Sigrid Godelieve Victor Cornelis, Sint-Martens-Latem (BE)

(73) Assignees: Merck Patent GmbH; Ablynx NV

(21) Appl. No.: 13/698,992

(22) PCT Filed: May 20, 2011
(86) PCT No.: PCT/EP2011/058295

§ 371 Date: Jan. 25, 2013

Related U.S. Application Data
(60) Provisional application No. 61/346,548, filed on May 20, 2010.

(51) Int. Cl. C07K 16/28

(52) U.S. Cl. CPC C07K 16/2863
USPC 424/139.1; 530/387.9; 530/387.3; 536/23.53

(57) ABSTRACT

The present disclosure relates to amino acid sequences that are directed against (as defined herein) HER3, as well as to compounds or constructs, and in particular proteins and polypeptides, that comprise or essentially consist of one or more such amino acid sequences (also referred to herein as “amino acid sequences of the invention”, “compounds of the invention”, and “polypeptides of the invention”, respectively). The disclosure also relates to nucleic acids encoding such amino acid sequences and polypeptides (also referred to herein as “nucleic acids of the invention” or “nucleotide sequences of the invention”); to methods for 10 preparing such amino acid sequences and polypeptides; to host cells expressing or capable of expressing such amino acid sequences or polypeptides; to compositions, and in particular to pharmaceutical compositions, that comprise such amino acid sequences, polypeptides, nucleic acids and/or host cells; and to uses of such amino acid sequences or polypeptides, nucleic acids, host cells and/or compositions, in particular for prophylactic, therapeutic or diagnostic purposes, such as the prophylactic, therapeutic or diagnostic purposes mentioned herein.

[0001] The present invention relates to amino acid sequences that are directed against (as defined herein) HER3, as well as to compounds or constructs, and in particular proteins and polypeptides, that comprise or essentially consist of one or more such amino acid sequences (also referred to herein as “amino acid sequences of the invention”, “compounds of the invention”, and “polypeptides of the invention”, respectively).

[0002] In some specific, but non-limiting aspects (described in more detail herein), the invention provides:
[0003] amino acid sequences that are directed against (as defined herein) HER3 and that are capable of inhibiting or blocking (fully or partially, as further described herein) the binding of HRG to HER3 (as further described herein);
[0004] amino acid sequences that are directed against (as defined herein) HER3 and that are capable of inhibiting or blocking (fully or partially, as further described herein) heterodimerization of HER3 (as further described herein);
[0005] amino acid sequences that are directed against (as defined herein) HER3 and that are capable of binding to domain II of HER3; and/or
[0006] amino acid sequences that are directed against (as defined herein) HER3 and that are capable of inhibiting or blocking (fully or partially, as further described herein) HER3 phosphorylation (as further described herein).

[0007] As further described herein, in a specific preferred, but non-limiting aspect, the various amino acid sequences directed against HER3 that are described herein (including those according to specific aspects) are preferably immunoglobulin single variable domains (also referred to herein as “ISV's). An immunoglobulin single variable domain is an amino acid sequence that:
[0008] comprises an immunoglobulin fold or that, under suitable conditions (such as physiological conditions) is capable of forming an immunoglobulin fold (i.e. by folding), i.e. so as to form an immunoglobulin variable domain (such as, for example, a VH, VL or VHH domain);

[0009] and that
[0010] forms (or under such suitable conditions is capable of forming) an immunoglobulin variable domain that comprises a functional antigen binding activity (in the sense that it does not require an interaction with another immunoglobulin variable domain (such as a VH-VL interaction) to form a functional antigen binding site).

[0011] Amino acid sequences of the invention that are ISV's are also referred to herein as “ISV's of the invention”. Some preferred examples of immunoglobulin single variable domains suitable for use in the invention will become clear from the further description herein, and for example comprise VHH's and/or (other) Nanobodies (preferred) such as humanized VHH's or camelized VH's such as camelized human VH, dAb's and (single) domain antibodies.

[0012] As also further described herein, the various amino acid sequences directed against HER3 that are described herein (including those according to specific aspects) can with advantage be used as building blocks to provide multivalent (as described herein, such as bi- or trivalent), multispecific (as described herein, such as bi- or trispecific) or multiparatopic (as described herein, such as biparatopic) polypeptides of the invention, and such polypeptides of the invention for further preferred but non-limiting aspects of the invention. Again, also in these aspects of the invention, the amino acid sequences of the invention present in such polypeptides are preferably ISV's (and preferably nanobodies as described herein).

[0013] For example and without limitation, in one specific aspect of the invention, such a polypeptide may comprise at least one (such as one or two) ISV's (and preferably nanobodies) that are directed against (as defined herein) HER3 and that are capable of inhibiting or blocking (fully or partially, as further described herein) the binding of HRG to HER3 (as further described herein) and at least one (such as one or two) ISV's (and preferably nanobodies) that are directed against (as defined herein) HER3 and that are capable of inhibiting or blocking (fully or partially, as further described herein) heterodimerization of HER3 (as further described herein). These and the other amino acid sequences and polypeptides of the invention may also have been provided with an increased half-life in vivo, as further described herein.

[0014] Some preferred but non-limiting examples of the various amino acid sequences and polypeptides of the invention will become clear from the further description herein.

[0015] The invention also relates to nucleic acids encoding such amino acid sequences and polypeptides (also referred to herein as “nucleic acids of the invention” or “nucleotide sequences of the invention”); to methods for preparing such amino acid sequences and polypeptides; to host cells expressing or capable of expressing such amino acid sequences or polypeptides; to compositions, and in particular to pharmaceutical compositions, that comprise such amino acid sequences, polypeptides, nucleic acids and/or host cells; and to uses of such amino acid sequences or polypeptides, nucleic acids, host cells and/or compositions, in particular for prophylactic, therapeutic or diagnostic purposes, such as the prophylactic, therapeutic or diagnostic purposes mentioned herein.

[0016] Other aspects, embodiments, advantages and applications of the invention will become clear from the further description herein.

### BACKGROUND OF THE INVENTION

[0017] HER3 (human epidermal growth factor receptor 3) belongs to the ErbB/HER subfamily of polypeptide growth factor receptors, which includes the epidermal growth factor (EGF) receptor (EGFR, ErbB1, HER1), the neu oncogene product (ErbB2, HER2), and the more recently identified ErbB3, HER3 and ErbB4, HER4 receptor proteins (see, e.g., Plowman et al. (1990), Proc. Natl. Acad. Sci. USA 87, 4905-4909; Hynes et. al. (1994) Biochim. Biophys. Acta Rev. Cancer 1198, 165-184). It is known that HER3 can bind multiple ligands, such as heregulin and the neuregulins 1 and 2; but that it lacks intrinsic tyrosine kinase activity (and because it is kinase inactive, the receptor can only initiate signal transduction when dimerized with another HER family member, such as HER1, HER2 or HER4).

[0018] More specifically, HER3 is a membrane-bound protein and has a neuregulin binding domain but not an active kinase domain. It therefore can bind this ligand but not convey the signal into the cell through protein phosphorylation. However, it does form heterodimers with other EGF receptor family members which do have kinase activity. Heterodimerization leads to the activation of pathways which lead to cell devision, proliferation, differentiation, migration and other cellular processes. Complex multilayered signaling generated receptor cross-talk and lateral signaling is becoming evident within the EGFR family and other receptor tyrosine kinases like MET (Engelmann et. al. (2007), Science 316, 1039-1043). Deregulated, aberrant signaling due to mutation, amplification and presence of active autrocrine loops may participate in development of cancer and other diseases. Amplification of this gene and/or overexpression of its protein have been reported in numerous cancers, including prostate, bladder, and breast tumors (see e.g. WO2008100624, WO2007077028, Horst et al. (2005) Int J Cancer, 115, 519-527; Xue et al. (2006) Cancer Res. 66, 1418-1426). HER3 is also known as LCCS2; ErbB-3; c-erbB3; erbB3-S; MDA-BF-1; MGC88033; c-erbB-3; p180-ErbB3; p45-sErbB3; p85-sErbB3; ERBB3.

[0019] When it comes to the role of HER3 in cancer, it has been suggested that HER3 may be necessary for HER2-mediated tumorigenesis, in the sense that HER2 may require HER3 in order to transform normal cells into cancer cells. For example, it has been found that increased expression of HER3 increases the signaling potency of HER2, whereas decreased HER3 expression results in the loss of HER2 activity. This has led to the hypothesis that HER3 may be involved in HER2-mediated tumorigenesis through dimerization with HER2.

[0020] It has also been suggested that HER3 may enable escape from inhibition of other HER receptors. For example, preclinical research has shown that upregulation of HER3 activity may be a mechanism by which tumor cells can escape tyrosine kinase inhibition of HER family receptors, and that tumor cells may compensate for tyrosine kinase inhibition of other HER receptors by increasing expression of HER3, which is kinase inactive. It has also been found that in HER2:HER3 heterodimers, HER2 transphosphorylates HER3.

[0021] HER3 has also been found to be overexpressed in several types of cancer (including without limitation breast and pancreatic cancer), and it has been found that there may be a correlation between the expression of HER2/HER3 and the progression from an non-invasive to an invasive stage (Baselga et al., 2009 Nature Reviews Cancer 9, 463-475).

[0022] Although, the role of HER3 in cancer and oncogenic signaling has been implicated (supra), its importance in an anti-cancer treatment remains unclear due to the complex ErbB network in which HER3 is a component thereof. Current immunotherapies primarily focus on inhibiting the action of HER2 and, in particular, heterodimerization of HER2/HER3 complexes (see, e.g., Sliwkowski et al. (1994) J. Biol. Chem. 269(20): 14661-14665).

[0023] It is an object of the present invention to provide improved immunotherapies that effectively inhibit HER3 signaling, and can be used to treat and diagnose a variety of cancers.

### SUMMARY OF THE INVENTION

[0024] In the invention, a number of immunoglobulin single variable domains (as further described herein) have been identified and characterized (and where appropriate humanized and/or sequence optimized) that can bind to HER3 (and in particular specifically bind to HER3, as further defined herein) and that can (be used to) modulate (as defined herein) HER3 mediated signalling and/or modulate (some or all of) the biological effects of HER3 and/or modulate (some or all of) the biological mechanisms/pathways in which HER3 and/or HER3 mediated signalling is involved. It has also been found that the immunoglobulin single variable domains provided by the present invention can not only be used per se for such modulation, but can also with further advantage be linked to/combined with each other (i.e. so as to provide multivalent, multispecific and/or biparatopic constructs, as further defined herein) and/or with other moieties, binding domains or binding units to provide proteins, polypeptides or (other) compounds or constructs that can be used for such modulation.

[0025] Thus, the use of the immunoglobulin single variable domains (or “ISV's”) provided by the invention as “building blocks” for providing such proteins, polypeptides or (other) compounds or constructs forms an important advantage and aspect of the invention.

[0026] For example, and with advantage but without limitation, it has been found that the various immunoglobulin single variable domains or “ISV's” provided by the invention can bind in different ways to HER3, and thus provide different modes-of-action in the way that they interact with HER3 and/or modulate HER3 mediated signalling. For example, some of the ISV's provided by the invention are capable of inhibiting binding of HRG to HER3, whereas others can bind to domain II of HER3 and/or block HER3 transphosphorylation. Yet others can block dimerisation of HER3 with itself of with other members of the HER family (such as HER1, HER2 or HER3). Hence, the amino acid of the invention (or ISV) is considered a building block.

[0027] Thus, the invention provides a range of different ISV's that can influence HER3, HER3 mediated signalling and/or the biological effects associated with HER3 and/or with HER3 mediated signalling.

[0028] In addition, when the ISV's provided by the invention are suitably used or combined as building blocks to provide further proteins, polypeptides or (other) compounds or constructs, the invention for example makes it possible, with advantage, to combine different interactions with HER3 and/or different mode-of-actions into a single molecule, compound, construct, protein or polypeptides. Examples of the same will become clear from the further description herein.

[0029] The effects or influence that the various ISV's, proteins, polypeptides, compounds and/or constructs that are provided by the invention have on HER3 and HER3 mediated signalling (including their mode/modes of action) can be determined using various suitable assays and in vivo models, such as an HER3 internalization assay (for example measuring reduction HER3 surface expression on a suitable cell such as MCF7 and MALME-3M cells); ligand blocking assays (such as HRG competition Alphascreen or FACS assays); HRG induced HER3 signalling blocking assays (such as an assay measuring inhibition of pHER3 in HER3-ligand stimulated MCF7, CHO-HER2-HER3, BT474 and MDA-MB468 cells); assays measuring heterodimerization blocking (such as pHER3 blocking of TGF-alpha-stimulated CHO-EGFR-HER3, β-cellulin-stimulated MDA-MB468 cells); assay measuring inhibition of downstream signalling (such as an assay measuring pAKT and/or pMAPK signaling in HER3-ligand stimulated MCF7, A549 and BT474 cells); or cell migration assays (such as assays measuring HRG induced migration of A431 cells). Reference is for example made to the Experimental Section and the results presented therein.

[0030] Thus, the ISV's, polypeptides and compositions of the present invention can generally be used to modulate, and in particular inhibit and/or prevent, binding of HER3 to Heregulin and/or blocking heterodimerization with MET, EGFR or HER2 (see e.g. Hsieh and Moasser, 2007, British Journal of Cancer), and thus to modulate, and in particular inhibit or prevent, the signalling that is mediated by HER3 and/or Heregulin, to modulate the biological pathways in which HER3 and/or Heregulin are involved, and/or to modulate the biological mechanisms, responses and effects associated with such signalling or these pathways.

[0031] As such, the polypeptides and compositions of the present invention can be used for the diagnosis and treatment (as defined herein) of a variety of cancers. Generally, “variety of cancers” can be defined as diseases and disorders that can be prevented and/or treated, respectively, by suitably administering to a subject in need thereof (i.e. having the disease or disorder or at least one symptom thereof and/or at risk of attracting or developing the disease or disorder) of either a polypeptide or composition of the invention (and in particular, of a pharmaceutically active amount thereof) and/or of a known active principle active against HER3 or a biological pathway or mechanism in which HER3 is involved (and in particular, of a pharmaceutically active amount thereof). Examples of such variety of cancers will be clear to the skilled person based on the disclosure herein, and for example include the following diseases and disorders:

Cancer (Sithanandam and Anderson review (2008) Cancer Gene Therapy 15(7), 413-448; breast cancer (Lemoine et. al. (1992) Br J Cancer 66, 1116-1121; Witton et al. (2003) J Pathol 200(3):290-297; Koutras et al (2010) Crit. Rev Oncol Hematol. 74(2):73-78); lung cancer (Müller-Tidow (2005) Cancer Res 65(5):1778-1782; Timotheadou et al., (2007) Anticancer Res. 27(6C):4481-4489); ovarian cancer (Tanner et. al. (2006) J Clin Oncol 24(26): 4317-4323); prostate cancer (Lozano et. al. (2005) BMC Genomics 6:109; Soler et al., 2009. Int J Cancer 125(11):2565-2575) urinary bladder cancer (Rajkumar et. al. (1996) J Pathol, 179(4):381-385); brain cancer (Addo-Yobo et. al. (2006) J Neuropathol Exp Neurol 65(8):769-775, Andersson et. al. (2004) Acta Neuropathol, 108(2):135-142); Retinoblastoma (Chakraborty et. al. (2007) Genomics 90(3):344-353); melanoma (Segal et. al. (2003) J Clin Oncol. 2003 May 1; 21(9):1775-1781; Schaefer et. al. (2004) Cancer Res 64:3395-3405; Reschke et al., 2008 Clin Cancer Res. 14(16):5188-97); colorectal cancer (Grivas et. al. (2007) Eur J Cancer 43(17):2602-2611; Ciardiello et al. (1991) Proc Natl Acad Sci USA. 88(17):7792-7796); pancreatic cancer (Friess et. al. (1995) Clin Cancer Res 1(11):1413-20); Lemoine et al., 1992 J. Pathol. 168: 269-273); gastric cancer (Sanidas (1993), Int J Cancer 54(6):935-40, Hayashi et. al. (2008) Clin Cancer Res 14(23):7843-7849; Hayashi et al., (2008) Clin Cancer Res. 14(23):7843-9); head and neck cancer (Funayama (1998) Oncology 55(2):161-167, Erjala (2006) Clin Cancer Res 12(13):4103-4111); cervix cancer (Fuchs et al., 2007 Anticancer Res. 27(2):959-63); oesophagus cancer (Wei et al., 2007 Int J. Oncol. 31(3):493-9.); and/or nerve regeneration (Lindholm et. al. (2002) Exp Brain Res) 2002 January; 142(1):81-90.

[0032] In particular, the polypeptides and compositions of the present invention can be used for the diagnosis and treatment of variety of cancers which are characterized by excessive and/or unwanted signalling mediated by ErbB network of proteins or in general by any pathway(s) in which HER3 is involved. Examples of such variety of cancers will again be clear to the skilled person based on the disclosure herein.

[0033] Thus, without being limited thereto, it is also envisaged that the polypeptides of the invention can be used to prevent and/or to treat all diseases and disorders for which treatment with such active principles is currently being developed, has been proposed, or will be proposed or developed in future. In addition, it is envisaged that, because of their favourable properties as further described herein, the polypeptides of the present invention may be used for the prevention and treatment of other diseases and disorders than those for which these known active principles are being used or will be proposed or developed; and/or that the polypeptides of the present invention may provide new methods and regimens for treating the diseases and disorders described herein.

[0034] Other applications and uses of the amino acid sequences and polypeptides of the invention will become clear to the skilled person from the further disclosure herein.

[0035] Generally, it is an object of the invention to provide pharmacologically active agents, as well as compositions comprising the same, that can be used in the diagnosis, prevention and/or treatment of a variety of cancers and of the further diseases and disorders mentioned herein; and to provide methods for the diagnosis, prevention and/or treatment of such diseases and disorders that involve the administration and/or use of such agents and compositions.

[0036] In particular, it is an object of the invention to provide such pharmacologically active agents, compositions and/or methods that have certain advantages compared to the agents, compositions and/or methods that are currently used and/or known in the art. These advantages will become clear from the further description below.

[0037] More in particular, it is an object of the invention to provide therapeutic proteins that can be used as pharmacologically active agents, as well as compositions comprising the same, for the diagnosis, prevention and/or treatment of variety of cancers and of the further diseases and disorders mentioned herein; and to provide methods for the diagnosis, prevention and/or treatment of such diseases and disorders that involve the administration and/or the use of such therapeutic proteins and compositions.

[0038] Accordingly, it is a specific object of the present invention to provide amino acid sequences that are directed against (as defined herein) HER3, in particular against HER3 from a warm-blooded animal, more in particular against HER3 from a mammal, and especially against human HER3 (SEQ ID NO: 1); and to provide proteins and polypeptides comprising or essentially consisting of at least one such amino acid sequence.

[0039] In particular, it is a specific object of the present invention to provide such amino acid sequences and such proteins and/or polypeptides that are suitable for prophylactic, therapeutic and/or diagnostic use in a warm-blooded animal, and in particular in a mammal, and more in particular in a human being.

[0040] More in particular, it is a specific object of the present invention to provide such amino acid sequences and such proteins and/or polypeptides that can be used for the prevention, treatment, alleviation and/or diagnosis of one or more diseases, disorders or conditions associated with HER3 and/or mediated by HER3 (such as the diseases, disorders and conditions mentioned herein) in a warm-blooded animal, in particular in a mammal, and more in particular in a human being.

[0041] It is also a specific object of the invention to provide such amino acid sequences and such proteins and/or polypeptides that can be used in the preparation of pharmaceutical or veterinary compositions for the prevention and/or treatment of one or more diseases, disorders or conditions associated with and/or mediated by HER3 (such as the diseases, disorders and conditions mentioned herein) in a warm-blooded animal, in particular in a mammal, and more in particular in a human being.

[0042] In the invention, generally, these objects are achieved by the use of the amino acid sequences, proteins, polypeptides and compositions that are described herein.

[0043] In general, the invention provides amino acid sequences that are directed against (as defined herein) and/or can specifically bind (as defined herein) to HER3; as well as compounds and constructs, and in particular proteins and polypeptides, that comprise at least one such amino acid sequence.

[0044] As already mentioned, in some specific, but non-limiting aspects (described in more detail herein), the invention provides:

[0045] amino acid sequences that are directed against (as defined herein) HER3 and that are capable of inhibiting or blocking (fully or partially, as further described herein) ligand binding, and in particular of inhibiting or blocking (fully or partially, as further described herein) the binding of HRG to HER3 (as further described herein). These amino acid sequences are also referred to herein as “HRG-blocking amino acid sequences” or “HRG-blocking building blocks”. Preferably, these HRG-blocking amino acid sequences are ISV's (as described herein), in which case they are also referred to as “HRG-blocking ISV's”. Preferably, any HRG-blocking amino acid sequences, HRG-blocking building blocks or HRG-blocking ISV's are such that they have blocking activity, i.e. block HRG binding to HER3 partially or completely, which can be determined by any suitable assay known to the person skilled in the art, such as, for instance, by an Alphascreen assay or by a FACS competition assay (e.g. as described herein). Preferably, the blocking activity is determined by a FACS competition assay as described in Example 9. Preferably, the ISV has a blocking activity or competition capacity in CHO cells of blocking or competing HRG1-β1 binding to HER3 with an IC50 of less than 600 nM, but preferably, 500 nM, 400 nM, 300 nM, 200 nM, 100 nM or even less.
[0046] For instance, the 04C07-like ISV has a blocking activity or competition capacity in this assay with an IC50 of less than 100 nM, more preferably, less than 75 nM, 50 nM or even less, such as less than 20 nM or 15 nM, 10 nM, 9 nM, 8 nM, 7 nM or 6 nM or even more preferably of less than 5 nM.
[0047] For instance, the 17B05-like ISV has a blocking activity or competition capacity in this assay with an IC50 of less than 150 nM, more preferably, less than 100 nM, 90 nM, 80 nM or even less, such as less than 70 nM or 60 nM, 50 nM or 40 nM or even more preferably of less than 35 nM.
[0048] For instance, the 21F06-like ISV has a blocking activity or competition capacity in this assay with an IC50 of less than 100 nM, more preferably, less than 80 nM, 70 nM or even less, such as less than 60 nM or 50 nM, 40 nM, 30 nM, 20 nM, 15 nM or 13 nM or even more preferably of less than 11 nM.
   In one specific, but non-limiting aspect, (some of the) “HRG-blocking amino acid sequences” or “HRG-blocking building blocks” may (and preferably also are) be such that they are capable of inhibiting or blocking HER3 signaling (see Examples 9 and 10), for example in the phosphorylation assay used in Example 10. Preferably, any HRG-blocking amino acid sequences, HRG-blocking building blocks or HRG-blocking ISV's are such that they have blocking activity, i.e. block or inhibit HRG mediated HER3 phosphorylation partially or completely, which can be determined by any suitable assay known to the person skilled in the art, such as, for instance, by any suitable phosphorylation assay, such as, for instance, an HER3 phosphorylation assay, an AKT phosphorylation assay or ERK1/2 phosphorylation assay as described herein.
   Preferably, the blocking activity or inhibiting capacity of phosphorylation is determined by a HER3 phosphorylation assay as described in Example 10. Preferably, the ISV has a blocking activity or an inhibition capacity of ligand (e.g. HRG1-β1) induced pHER3 phosphorylation in MCF-7 cells with an IC50 of less than 600 nM, but preferably, 500 nM, 400 nM, 300 nM, 200 nM, 100 nM or even less.
[0049] For instance, the 04C07-like ISV has a blocking activity or competition capacity of in this assay with an IC50 of less than 100 nM, more preferably, less than 75 nM, 50 nM or even less, such as less than 20 nM or 15 nM, 10 nM, 9 nM, 8 nM, 7 nM or 6 nM or even more preferably of less than 5, 4, 3 or 2 nM.
[0050] For instance, the 17B05-like ISV has a blocking activity or competition capacity of in this assay with an IC50 of less than 150 nM, more preferably, less than 100 nM, 90 nM, 80 nM or even less, such as less than 70 nM or 60 nM, 50 nM or 40 nM or even more preferably of less than 35 nM, such as less than 20 nM or 15 nM, 10 nM, 9 nM, 8 nM or 7 nM or even more preferably of less than 6 nM.
[0051] For instance, the 21F06-like ISV has a blocking activity or competition capacity of in this assay with an IC50 of less than 150 nM, more preferably, less than 100 nM, 90 nM, 80 nM or even less, such as less than 70 nM or 60 nM, 50 nM or 40 nM or even more preferably of less than 35 nM, such as less than 20 nM or 15 nM, 10 nM, 9 nM, 8 nM or even more preferably of less than 7 nM.

[0052] Preferably, the blocking activity or inhibiting capacity of signaling is determined by an AKT phosphorylation assay as described in Example 10.1. Preferably, the ISV has a blocking activity or an inhibition capacity of ligand (e.g. HRG1-β1) induced Akt-phosphorylation in MCF-7 cells with an IC50 of less than 600 nM, but preferably, 500 nM, 400 nM, 300 nM, 200 nM, 100 nM or even less.
[0053] For instance, the 04C07-like ISV has a blocking activity or competition capacity of in this assay with an IC50 of less than 100 nM, more preferably, less than 80 nM, 70 nM or even less, such as less than 60 nM or 50 nM, 45 nM, 40 nM, 35 nM, 30 nM or even more preferably of less than 20 nM.
[0054] For instance, the 17B05-like ISV has a blocking activity or competition capacity of in this assay with an IC50 of less than 150 nM, more preferably, less than 100 nM, 90 nM, 80 nM or even less, such as less than 70 nM or 60 nM, 50 nM or 40 nM or even more preferably of less than 35 nM, such as less than 20 nM or 15 nM, 12 nM, 11 nM, 10 nM or 9 nM or even more preferably of less than 8 nM.
[0055] For instance, the 21F06-like ISV has a blocking activity or competition capacity of in this assay with an IC50 of less than 150 nM, more preferably, less than 100 nM, 90 nM, 80 nM or even less, such as less than 70 nM or 60 nM, 55 nM or 50 nM or even more preferably of less than 45 nM, such as less than 40 nM or 35 nM, 30 nM, 27.5 nM, 25 nM or even more preferably of less than 24 nM.

[0056] Preferably, the blocking activity or inhibiting capacity of signaling is determined by an ERK1/2 phosphorylation assay as described in Example 10.2. Preferably, the ISV has a blocking activity or an inhibition capacity of ligand (e.g. HRG1-β1) induced ERK1/2-phosphorylation in MCF-7 cells with an IC50M of less than 600 nM, but preferably, 500 nM, 400 nM, 300 nM, 200 nM, 150 nM or even less.
[0057] For instance, the 04C07-like ISV has a blocking activity or competition capacity of in this assay with an IC50 of less than 150 nM, more preferably, less than 100 nM, 90 nM, 80 nM or even less, such as less than 80 nM, 70 nM or 60 nM, 55 nM or 50 nM or even more preferably of less than 45 nM, such as less than 40 nM or 35 nM or even more preferably of less than 30 nM.
[0058] For instance, the 17B05-like ISV has a blocking activity or competition capacity of in this assay with an IC50 of less than 150 nM, more preferably, less than 100 nM, 90 nM, 80 nM or even less, such as less than 70 nM or 60 nM, 50 nM or 40 nM or even more preferably of less than 35 nM, such as less than 20 nM or 15 nM, 10 nM, 7.5 nM, 5 nM or 4 nM or even more preferably of less than 3 nM.
[0059] For instance, the 21F06-like ISV has a blocking activity or competition capacity of in this assay with an IC50 of less than 150 nM, such as preferably less than 120 nM.

[0060] In yet another specific but non-limiting aspect, an HRG-blocking amino acid sequence (or HRG-blocking ISV) is an amino acid sequence (or ISV) that competes with either the amino acid sequence 21F06 (SEQ ID NO: 22) and/or the amino acid sequence 04C07 (SEQ ID NO: 15) for binding to HER3 and/or that is capable of cross-blocking (as defined herein) the binding of 21F06 and/or of 04C07 to HER3, for example and in particular in the assay described in Example 2 (section 2.9). Some preferred, but non-limiting examples of such HRG-blocking ISV's are the “21F06-like sequences” and the “04C07-like sequences” as further described herein. Some of the 21F06-like sequences may be non-limiting examples of ISV's of the invention that are capable of both blocking/inhibiting ligand binding as well as inhibiting/blocking signaling. Similarly, the 17B05-like sequences described herein are examples of ISV's of the invention that are capable of both blocking/inhibiting (trans)phosphorylation as well as ligand/HRG binding.

[0061] The invention provides amino acid sequences that are directed against (as defined herein) HER3 and that are capable of inhibiting or blocking (fully or partially, as further described herein) (hetero)dimerisation of HER3 (as further described herein), such as EGFR/HER1-HER3 (hetero)dimerisation (see for example Examples 13 and 16) and/or HER-2/HER3 (hetero)dimersation), for example in the HER-1/HER3 (hetero)dimerisation assay used in Example 13. These amino acid sequences are also referred to herein as “dimerisation-blocking amino acid sequences” or “dimerisation-blocking building blocks”. Preferably, these dimerisation-blocking amino acid sequences are ISV's (as described herein), in which case they are also referred to as “dimerisation-blocking ISV's”. Preferably, any dimerisation-blocking amino acid sequences, dimerisation-blocking building blocks or dimerisation-blocking ISV's are such that they block or inhibit (hetero)dimerisation, i.e. block or inhibit dimerisation of HER3 with MET, EGFR and/or HER2 partially or completely, which can be determined by any suitable assay known to the person skilled in the art, such as, for instance, by a transphosphorylation assay (e.g. as described herein). Preferably, the blocking or inhibiting capacity is determined by a transphosphorylation assay as described in Example 10 or 13, for instance, by determining the EGFR ligand (e.g. TGF-α) induced HER3 transphosphorylation as measured in cellular assay in MDA MB468 cells or CHO EGFR/HER3 cells.
[0062] Preferably, the ISV has a blocking or inhibiting activity of (hetero)dimerisation in CHO EGFR/HER3 cells of blocking or inhibiting dimerisation of HER3 with EGFR with an IC50 of less than 600 nM, but preferably, 500 nM, 400 nM, 300 nM, 200 nM, 100 nM or even less.
[0063] For instance, the 17B05-like ISV has a blocking activity or inhibiting capacity of in this assay with an IC50 of less than 100 nM, more preferably, less than 75 nM, 50 nM or even less, such as less than 20 nM or 15 nM, 10 nM, 5 nM, 4 nM, 3 nM or 2 nM or even more preferably of less than 1 nM.

[0064] In one specific, but non-limiting aspect, (some of the) dimerisation-blocking amino acid sequences or dimerisation-blocking building blocks may (and preferably also are) such that they are capable of inhibiting or blocking (fully or partially, as further described herein) ligand binding, and in particular of inhibiting or blocking (fully or partially, as further described herein) the binding of HRG to HER3. In one specific but non-limiting aspect, a dimerisation-blocking amino acid sequence (or dimerisation-blocking ISV) is an amino acid sequence (or ISV) that competes with the amino acid sequence 17B05 (SEQ ID NO: 13) for binding to HER3 and/or that is capable of cross-blocking (as defined herein) the binding of 17B05 to HER3, for example and in particular in the assay described in Example 2 (section 2.9) and Example 8. Some preferred, but non-limiting examples of such dimerisation-blocking ISV's are the “17B05-like sequences” as further described herein. At least some of these 17B05-like sequences are also non-limiting examples of ISV's of the invention that are capable of both blocking/inhibiting (trans)phosphorylation as well as ligand/HRG binding. The invention provides amino acid sequences that are directed against (as defined herein) HER3 and that are capable of binding to domain II of HER3. These amino acid sequences are also referred to herein as “domain II-binding amino acid sequences” or “domain II-binding building blocks”. Preferably, these domain II-binding amino acid sequences are ISV's (as described herein), in which case they are also referred to as “domain II-binding ISV's”. Preferably, any domain II-binding amino acid sequences, domain II-binding building blocks or domain II-binding ISV's are such that they bind to domain II of HER3, which can be determined by any suitable assay known to the person skilled in the art, such as, for instance, by epitope competition or domain swapping assays (e.g. as described herein). Preferably, the binding capacity to domain II is determined by binding to chimeric HER3 proteins as described in Example 8, for instance, by swapping human HER3 domains with chicken HER3 domains.

[0065] The domain II-binding amino acid sequences/ISV's or domain II-binding building blocks/ISV's provided by the invention may also have an effect (which may be limited/partial or more pronounced) on either ligand/HRG binding (in particular, they may to a limited/partial extent be capable of inhibiting or blocking the binding of ligand/HRG to HER3) and/or on the (hetero)dimerization of HER3.

[0066] In one specific, but non-limiting aspect, (some of the) “domain II-binding amino acid sequences” or “domain II-binding building blocks” may (and preferably also are) be such that they are capable of inhibiting or blocking HER3 phosphorylation (see Example 10), for instance in the phosphorylation assay used in Example 10. Preferably, any domain II-binding amino acid sequences or domain II-binding building blocks or domain II-binding ISV's are such that they have blocking activity, i.e. block or inhibit HRG mediated HER3 phosphorylation partially or completely, which can be determined by any suitable assay known to the person skilled in the art, such as, for instance, by any suitable phosphorylation assay, such as, for instance, an HER3 phosphorylation assay, an AKT phosphorylation assay or ERK1/2 phosphorylation assay as described herein.

[0067] Preferably, the blocking activity or inhibiting capacity of phosphorylation is determined by a HER3 phosphorylation assay as described in Example 10. Preferably, the ISV has a blocking activity or an inhibition capacity of ligand (e.g. HRG1-β1) induced pHER3 phosphorylation in MCF-7 cells with an IC50 of less than 600 nM, but preferably, 500 nM, 400 nM, 300 nM, 200 nM, 100 nM or even less.
[0068] For instance, the 18G11-like ISV has a blocking activity or competition capacity of in this assay with an IC50 of less than 150 nM, more preferably, less than 100 nM, 90 nM, 80 nM or even less, such as less than 70 nM or 60 nM, 50 nM or 40 nM or even more preferably of less than 35 nM, such as less than 20 nM or 15 nM, 14 nM, 13 nM, 12 nM or even more preferably of less than 11 nM.
[0069] For instance, the 34C07-like ISV has a blocking activity or competition capacity of in this assay with an IC50 of less than 150 nM, more preferably, less than 100 nM, 90 nM, 80 nM or even less, such as less than 70 nM or 60 nM, 50 nM or 40 nM or even more preferably of less than 35 nM, such as less than 20 nM or 16 nM, 15 nM, 14 nM, 13 nM or even more preferably of less than 12 nM.

[0070] Preferably, the blocking activity or inhibiting capacity of phosphorylation is determined by an AKT phosphorylation assay as described in Example 10.1. Preferably, the ISV has a blocking activity or an inhibition capacity of ligand (e.g. HRG1-β1) induced Akt-phosphorylation in MCF-7 cells with an IC50 of less than 600 nM, but preferably, 500 nM, 400 nM, 300 nM, 200 nM, 150 nM or even less.
[0071] For instance, the 18G11-like ISV has a blocking activity or competition capacity of in this assay with an IC50 of less than 150 nM, more preferably, less than 140 nM.
[0072] For instance, the 34C07-like ISV has a blocking activity or competition capacity of in this assay with an IC50 of less than 150 nM, more preferably, less than 100 nM or 90 nM, 80 nM, 70 nM, 60 nM or even more preferably of less than 50 nM.

[0073] Preferably, the blocking activity or inhibiting capacity of phosphorylation is determined by an ERK1/2 phosphorylation assay as described in Example 10.2. Preferably, the ISV has a blocking activity or an inhibition capacity of ligand (e.g. HRG1-β1) induced ERK1/2-phosphorylation in MCF-7 cells with an IC50M of less than 600 nM, but preferably, 500 nM, 400 nM, 300 nM, 200 nM, 150 nM or even less.
[0074] For instance, the 34C07-like ISV has a blocking activity or competition capacity of in this assay with an IC50 of less than 150 nM, such as less than 120 nM.

[0075] In one specific but non-limiting aspect, a domain II-binding amino acid sequence (or domain II-binding ISV) is an amino acid sequence (or ISV) that competes with the amino acid sequence 18G11 (SEQ ID NO: 16) and/or with the amino acid sequence 34C07 (SEQ ID NO: 18) for binding to HER3 and/or that is capable of cross-blocking (as defined herein) the binding of 18G11 and/or of 34C07 to HER3, for example and in particular in the assay described in Example 2 (section 2.9). Also, in one specific but non-limiting aspect, a domain II-binding amino acid sequence is capable of inhibiting or blocking HER3 phosphorylation (see Examples 9 and 10), for example in the phosphorylation assay used in Example 10, preferably essentially without blocking or substantially inhibiting ligand binding. Some preferred, but non-limiting examples of such domain II-binding ISV's are the “18G11-like sequences” and the “34C07-like sequences” as further described herein. Of these, some of the 34C07-like sequences are examples of ISV's of the invention that not only bind to domain II, but also to a limited/partial extent are capable of inhibiting ligand/HER3 binding.

[0076] Also, in the present description and claims, the following terms are defined as follows:
[0077] A) 21F06-like sequences: a “21F06-like sequence”,“21F06-like ISV” or “21F06-like building block” is defined as an ISV (as described herein) that comprises:
   [0078] a) a CDR1 which comprises or essentially consists of either (i) the amino acid sequence LNAMG (SEQ ID NO: 67) or (ii) an amino acid sequence that has only 3, 2 or 1 amino acid difference(s) (as defined herein) with the amino acid sequence LNAMG; and/or
   [0079] b) a CDR2 which comprises or essentially consists of either (i) the amino acid sequence AIDWSDGNKDYADSVKG (SEQ ID NO: 97) or (ii) an amino acid sequence that has at least 80%, such as at least 85%, for example at least 90% or more than 95% sequence identity with the amino acid sequence AIDWSDGNKDYADSVKG; or (iii) an amino acid sequence that has only 7, 6, 5, 4, 3, 2 or 1 amino acid difference(s) (as defined herein) with the amino acid sequence AIDWSDGNKDYADSVKG; and/or
   [0080] c) a CDR3 which comprises or essentially consists of either (i) the amino acid sequence DTPPWGPMIYIESYDS (SEQ ID NO: 127) or (ii) an amino acid sequence that has at least 80%, such as at least 85%, for example at least 90% or more than 95% sequence identity with the amino acid sequence DTPPWGPMIYIESYDS; or (iii) an amino acid sequence that has only 7, 6, 5, 4, 3, 2 or 1 amino acid difference(s) (as defined herein) with the amino acid sequence DTPPWGPMIYIESYDS;
   [0081] in which the framework sequences present in such an ISV are as further described herein, and in which CDR1, CDR2 and CDR3 are preferably such that the 21F06-like ISV has blocking activity, e.g. block HRG binding to HER3 partially or completely as described above, and/or blocking activity or inhibiting capacity of phosphorylation in a HER3 phosphorylation assay, and/or pAKT phosphorylation assay, and/or ERK1/2 phosphorylation assay, all as described above.
   [0082] As also mentioned herein, (some of the) 21F06-like sequences may (and preferably also are) be such that they are capable of inhibiting or blocking HER3 phosphorylation (see Examples 9 and 10), for example in the phosphorylation assay used in Example 10. Preferably, in such a 21F06-like sequence, CDR1 and CDR2 are as defined under a) and b), respectively; or CDR1 and CDR3 are as defined under a) and c), respectively; or CDR2 and CDR3 are as defined under b) and c), respectively. More preferably, in such a 21F06-like sequence, CDR1, CDR2 and CDR3 are all as defined under a), b) and c), respectively. Again, in such an 21F06-like sequence, CDR1, CDR2 and CDR3 are preferably such that the 21F06-like ISV has blocking activity, e.g. block HRG binding to HER3 partially or completely as described above, and/or blocking activity or inhibiting capacity of phosphorylation in a HER3 phosphorylation assay, and/or pAKT phosphorylation assay, and/or ERK1/2 phosphorylation assay, all as described above above.
   [0083] For example, in such an 21F06-like sequence: CDR1 may comprise or essentially consist of the amino acid sequence LNAMG (with CDR2 and CDR3 being as defined under b) and c), respectively); and/or CDR2 may comprise or essentially consist of the amino acid sequence AIDWSDGNKDYADSVKG (with CDR1 and CDR3 being as defined under a) and c), respectively); and/or CDR3 may comprise or essentially consist of the amino acid sequence DTPPWGPMIYIESYDS (with CDR1 and CDR2 being as defined under a) and b), respectively). Particularly, when an 21F06-like sequence is according to this aspect: CDR1 may comprise or essentially consist of the amino acid sequence LNAMG and CDR2 may comprise or essentially consist of the amino acid sequence AIDWSDGNKDYADSVKG (with CDR3 being as defined under c) above); and/or CDR1 may comprise or essentially consist of the amino acid sequence LNAMG and CDR3 may comprise or essentially consist of the amino acid sequence DTPPWGPMIYIESYDS (with CDR2 being as defined under b) above); and/or CDR2 may comprise or essentially consist of the amino acid sequence AIDWSDGNKDYADSVKG and CDR3 may comprise or essentially consist of the amino acid sequence DTPPWGPMIYIESYDS (with CDR1 being as defined under a) above). Again, in such 21F06-like sequences, CDR1, CDR2 and CDR3 are preferably such that the 21F06-like ISV has blocking activity, e.g. block HRG binding to HER3 partially or completely as described above, and/or blocking activity or inhibiting capacity of phosphorylation in a HER3 phosphorylation assay, and/or pAKT phosphorylation assay, and/or ERK1/2 phosphorylation assay, all as described above. In a specifically preferred aspect, a “21F06-like sequence”,“21F06-like ISV” or “21F06-like building block” is an ISV that comprises:
   [0084] d) a CDR1 which is either (i) the amino acid sequence LNAMG or (ii) an amino acid sequence that has only 3, 2 or 1 amino acid difference(s) (as defined herein) with the amino acid sequence LNAMG; and/or
   [0085] e) a CDR2 which is either (i) the amino acid sequence AIDWSDGNKDYADSVKG or (ii) an amino acid sequence that has at least 80%, such as at least 85%, for example at least 90% or more than 95% sequence identity with the amino acid sequence AIDWSDGNKDYADSVKG; or (iii) an amino acid sequence that has only 7, 6, 5, 4, 3, 2 or 1 amino acid difference(s) (as defined herein) with the amino acid sequence AIDWSDGNKDYADSVKG; and/or
   [0086] f) a CDR3 which is either (i) the amino acid sequence DTPPWGPMIYIESYDS or (ii) an amino acid sequence that has at least 80%, such as at least 85%, for example at least 90% or more than 95% sequence identity with the amino acid sequence DTPPWGPMIYIESYDS; or (iii) an amino acid sequence that has only 7, 6, 5, 4, 3, 2 or 1 amino acid difference(s) (as defined herein) with the amino acid sequence DTPPWGPMIYIESYDS;
   [0087] in which the framework sequences present in such an ISV are as further described herein, and in which CDR1, CDR2 and CDR3 are preferably such that the 21F06-like ISV has blocking activity, e.g. block HRG binding to HER3 partially or completely as described above, and/or blocking activity or inhibiting capacity of phosphorylation in a HER3 phosphorylation assay, and/or pAKT phosphorylation assay, and/or ERK1/2 phosphorylation assay, all as described above. Preferably, in a 21F06-like sequence according to this specifically preferred aspect, CDR1 and CDR2 are as defined under d) and e), respectively; or CDR1 and CDR3 are as defined under d) and f), respectively; or CDR2 and CDR3 are as defined under e) and f), respectively. More preferably, in such a 21F06-like sequence, CDR1, CDR2 and CDR3 are all as defined under d), e) and f), respectively. Again, in such an 21F06-like sequence, CDR1, CDR2 and CDR3 are preferably such that the 21F06-like ISV has blocking activity, e.g. block HRG binding to HER3 partially or completely as described above, and/or blocking activity or inhibiting capacity of phosphorylation in a HER3 phosphorylation assay, and/or pAKT phosphorylation assay, and/or ERK1/2 phosphorylation assay, all as described above above.
   [0088] For example, in a 21F06-like sequence according to this specifically preferred aspect: CDR1 is the amino acid sequence LNAMG (with CDR2 and CDR3 being as defined under e) and f), respectively); and/or CDR2 is the amino acid sequence AIDWSDGNKDYADSVKG (with CDR1 and CDR3 being as defined under d) and f), respectively); and/or CDR3 is the amino acid sequence DTPPWGPMIYIESYDS (with CDR1 and CDR2 being as defined under d) and e), respectively). Particularly, when an 21F06-like sequence is according to this aspect: CDR1 is the amino acid sequence LNAMG and CDR2 is the amino acid sequence AIDWSDGNKDYADSVKG (with CDR3 being as defined under 0 above); and/or CDR1 is the amino acid sequence LNAMG and CDR3 is the amino acid sequence DTPPWGPMIYIESYDS (with CDR2 being as defined under e) above); and/or CDR2 is the amino acid sequence AIDWSDGNKDYADSVKG and CDR3 is DTPPWGPMIYIESYDS (with CDR1 being as defined under d) above). Again, in such 21F06-like sequences, CDR1, CDR2 and CDR3 are preferably such that the 21F06-like ISV has blocking activity, e.g. block HRG binding to HER3 partially or completely as described above, and/or blocking activity or inhibiting capacity of phosphorylation in a HER3 phosphorylation assay, and/or pAKT phosphorylation assay, and/or ERK1/2 phosphorylation assay, all as described above above.
   [0089] In a particularly preferred 21F06-like sequence: CDR1 is the amino acid sequence LNAMG, CDR2 is the amino acid sequence AIDWSDGNKDYADSVKG; and CDR3 is the amino acid sequence DTPPWGPMIYIESYDS.
   [0090] In all the 21F06-like sequence described in this paragraph A), the framework sequences may be as further described herein. Preferably, the framework sequences are such that the framework sequences have at least 80%, such as at least 85%, for example at least 90%, such as at least 95% sequence identity with the framework sequences of 21F06 (which, for example, can be determined by determining the overall degree of sequence identity of a given sequence with the sequence of 21F06 while disregarding the CDR's in the calculation). Again, the combination of CDR's and frameworks present in a given sequence are preferably such that the resulting 21F06-like ISV has blocking activity, e.g. block HRG binding to HER3 partially or completely as described above, and/or blocking activity or inhibiting capacity of phosphorylation in a HER3 phosphorylation assay, and/or pAKT phosphorylation assay, and/or ERK1/2 phosphorylation assay, all as described above. In one specific aspect, a 21F06-like sequence is an ISV that has at least 70%, such at least 80%, for example at least 85%, such as at least 90% or more than 95% sequence identity with the amino acid sequence 21F06 (SEQ ID NO: 22). For example, in an 21F06-like sequence according to this aspect, the CDR's may be according to the specifically preferred aspect described above, and may in particularly (but without limitation) be LNAMG (CDR1); AIDWSDGNKDYADSVKG (CDR2); and DTPPWGPMIYIESYDS (CDR3). Again, preferably, the combination of CDR's and frameworks present in such a 21F06-like ISV are preferably such that the resulting 21F06-like ISV has
   [0091] blocking activity, e.g. block HRG binding to HER3 partially or completely as described above, and/or blocking activity or inhibiting capacity of phosphorylation in a HER3 phosphorylation assay, and/or pAKT phosphorylation assay, and/or ERK1/2 phosphorylation assay, all as described above.
   [0092] In one particular aspect, any 21F06-like sequence may be a humanized and/or sequence optimized sequence, as further described herein.
[0093] B) 04C07-like sequences: a “04C07-like sequence”, “04C07-like ISV” or “04C07-like building block” is defined as an ISV (as described herein) that comprises:
   [0094] a) a CDR1 which comprises or essentially consists of either (i) the amino acid sequence SYPMS (SEQ ID NO: 60) or (ii) an amino acid sequence that has only 3, 2 or 1 amino acid difference(s) (as defined herein) with the amino acid sequence SYPMS; and/or
   [0095] b) a CDR2 which comprises or essentially consists of either (i) the amino acid sequence TVSPGGITTSYADSVKG (SEQ ID NO: 90) or (ii) an amino acid sequence that has at least 80%, such as at least 85%, for example at least 90% or more than 95% sequence identity with the amino acid sequence TVSPGGITTSYADSVKG; or (iii) an amino acid sequence that has only 7, 6, 5, 4, 3, 2 or 1 amino acid difference(s) (as defined herein) with the amino acid sequence TVSPGGITTSYADSVKG; and/or
   [0096] c) a CDR3 which comprises or essentially consists of either (i) the amino acid sequence DLNN (SEQ ID NO: 120) or (ii) an amino acid sequence that has at least 50%, such as at least 75% sequence identity with the amino acid sequence DLNN; or (iii) an amino acid sequence that has only 2 or 1 amino acid difference(s) (as defined herein) with the amino acid sequence DLNN;
   [0097] in which the framework sequences present in such an ISV are as further described herein, and in which CDR1, CDR2 and CDR3 are preferably such that the 04C07-like ISV has blocking activity, e.g. block HRG binding to HER3 partially or completely as described above, and/or blocking activity or inhibiting capacity of phosphorylation in a HER3 phosphorylation assay, and/or pAKT phosphorylation assay, and/or ERK1/2 phosphorylation assay, all as described above.
   [0098] Preferably, in such a 04C07-like sequence, CDR1 and CDR2 are as defined under a) and b), respectively; or CDR1 and CDR3 are as defined under a) and c), respectively; or CDR2 and CDR3 are as defined under b) and c), respectively. More preferably, in such a 04C07-like sequence, CDR1, CDR2 and CDR3 are all as defined under a), b) and c), respectively. Again, in such an 04C07-like sequence, CDR1, CDR2 and CDR3 are preferably such that the 04C07-like ISV has blocking activity, e.g. block HRG binding to HER3 partially or completely as described above, and/or blocking activity or inhibiting capacity of phosphorylation in a HER3 phosphorylation assay, and/or pAKT phosphorylation assay, and/or ERK1/2 phosphorylation assay, all as described above above.
   [0099] For example, in such an 04C07-like sequence: CDR1 may comprise or essentially consist of the amino acid sequence SYPMS (with CDR2 and CDR3 being as defined under b) and c), respectively); and/or CDR2 may comprise or essentially consist of the amino acid sequence TVSPGGITTSYADSVKG (with CDR1 and CDR3 being as defined under a) and c), respectively); and/or CDR3 may comprise or essentially consist of the amino acid sequence DLNN (with CDR1 and CDR2 being as defined under a) and b), respectively). Particularly, when an 04C07-like sequence is according to this aspect: CDR1 may comprise or essentially consist of the amino acid sequence SYPMS and CDR2 may comprise or essentially consist of the amino acid sequence TVSPGGITTSYADSVKG (with CDR3 being as defined under c) above); and/or CDR1 may comprise or essentially consist of the amino acid sequence SYPMS and CDR3 may comprise or essentially consist of the amino acid sequence DLNN (with CDR2 being as defined under b) above); and/or CDR2 may comprise or essentially consist of the amino acid sequence TVSPGGITTSYADSVKG and CDR3 may comprise or essentially consist of the amino acid sequence DLNN (with CDR1 being as defined under a) above). Again, in such 04C07-like sequences, CDR1, CDR2 and CDR3 are preferably such that the 04C07-like ISV has blocking activity, e.g. block HRG binding to HER3 partially or completely as described above, and/or blocking activity or inhibiting capacity of phosphorylation in a HER3 phosphorylation assay, and/or pAKT phosphorylation assay, and/or ERK1/2 phosphorylation assay, all as described above.
   [0100] In a specifically preferred aspect, a “04C07-like sequence”, “04C07-like ISV” or “04C07-like building block” is an ISV that comprises:
   [0101] d) a CDR1 which is either (i) the amino acid sequence SYPMS or (ii) an amino acid sequence that has only 3, 2 or 1 amino acid difference(s) (as defined herein) with the amino acid sequence SYPMS; and/or
   [0102] e) a CDR2 which is either (i) the amino acid sequence TVSPGGITTSYADSVKG or (ii) an amino acid sequence that has at least 80%, such as at least 85%, for example at least 90% or more than 95% sequence identity with the amino acid sequence TVSPGGITTSYADSVKG; or (iii) an amino acid sequence that has only 7, 6, 5, 4, 3, 2 or 1 amino acid difference(s) (as defined herein) with the amino acid sequence TVSPGGITTSYADSVKG; and/or
   [0103] f) a CDR3 which is either (i) the amino acid sequence DLNN or (ii) an amino acid sequence that has at least 50%, such as at least 75%, sequence identity with the amino acid sequence DLNN; or (iii) an amino acid sequence that has only 2 or 1 amino acid difference(s) (as defined herein) with the amino acid sequence DLNN;
   [0104] in which the framework sequences present in such an ISV are as further described herein, and in which CDR1, CDR2 and CDR3 are preferably such that the 04C07-like ISV has blocking activity, e.g. block HRG binding to HER3 partially or completely as described above, and/or blocking activity or inhibiting capacity of phosphorylation in a HER3 phosphorylation assay, and/or pAKT phosphorylation assay, and/or ERK1/2 phosphorylation assay, all as described above.
   [0105] Preferably, in a 04C07-like sequence according to this specifically preferred aspect, CDR1 and CDR2 are as defined under d) and e), respectively; or CDR1 and CDR3 are as defined under d) and f), respectively; or CDR2 and CDR3 are as defined under e) and f), respectively. More preferably, in such a 04C07-like sequence, CDR1, CDR2 and CDR3 are all as defined under d), e) and f), respectively. Again, in such an 04C07-like sequence, CDR1, CDR2 and CDR3 are preferably such that the 04C07-like ISV has blocking activity, e.g. block HRG binding to HER3 partially or completely as described above, and/or blocking activity or inhibiting capacity of phosphorylation in a HER3 phosphorylation assay, and/or pAKT phosphorylation assay, and/or ERK1/2 phosphorylation assay, all as described above.
   [0106] For example, in a 04C07-like sequence according to this specifically preferred aspect: CDR1 is the amino acid sequence SYPMS (with CDR2 and CDR3 being as defined under e) and f), respectively); and/or CDR2 is the amino acid sequence TVSPGGITTSYADSVKG (with CDR1 and CDR3 being as defined under d) and f), respectively); and/or CDR3 is the amino acid sequence DLNN (with CDR1 and CDR2 being as defined under d) and e), respectively). Particularly, when an 04C07-like sequence is according to this aspect: CDR1 is the amino acid sequence SYPMS and CDR2 is the amino acid sequence TVSPGGITTSYADSVKG (with CDR3 being as defined under f) above); and/or CDR1 is the amino acid sequence SYPMS and CDR3 is the amino acid sequence DLNN (with CDR2 being as defined under e) above); and/or CDR2 is the amino acid sequence TVSPGGITTSYADSVKG and CDR3 is DLNN (with CDR1 being as defined under d) above). Again, in such 04C07-like sequences, CDR1, CDR2 and CDR3 are preferably such that the 04C07-like ISV has blocking activity, e.g. block HRG binding to HER3 partially or completely as described above, and/or blocking activity or inhibiting capacity of phosphorylation in a HER3 phosphorylation assay, and/or pAKT phosphorylation assay, and/or ERK1/2 phosphorylation assay, all as described above.
   [0107] In a particularly preferred 04C07-like sequence: CDR1 is the amino acid sequence SYPMS, CDR2 is the amino acid sequence TVSPGGITTSYADSVKG; and CDR3 is the amino acid sequence DLNN.
   [0108] In all the 04C07-like sequence described in this paragraph B), the framework sequences may be as further described herein. Preferably, the framework sequences are such that the framework sequences have at least 80%, such as at least 85%, for example at least 90%, such as at least 95% sequence identity with the framework sequences of 04C07 (which, for example, can be determined by determining the overall degree of sequence identity of a given sequence with the sequence of 04C07 while disregarding the CDR's in the calculation). Again, the combination of CDR's and frameworks present in a given sequence are preferably such that the resulting 04C07-like ISV has blocking activity, e.g. block HRG binding to HER3 partially or completely as described above, and/or blocking activity or inhibiting capacity of phosphorylation in a HER3 phosphorylation assay, and/or pAKT phosphorylation assay, and/or ERK1/2 phosphorylation assay, all as described above.
   [0109] In one specific aspect, a 04C07-like sequence is an ISV that has at least 70%, such at least 80%, for example at least 85%, such as at least 90% or more than 95% sequence identity with the amino acid sequence 04C07 (SEQ ID NO: 15). For example, in an 04C07-like sequence according to this aspect, the CDR's may be according to the specifically preferred aspect described above, and may in particularly (but without limitation) be SYPMS (CDR1); TVSPGGITTSYADSVKG (CDR2); and DLNN (CDR3). Again, preferably, the combination of CDR's and frameworks present in such a 04C07-like ISV are preferably such that the resulting 04C07-like ISV has blocking activity, e.g. block HRG binding to HER3 partially or completely as described above, and/or blocking activity or inhibiting capacity of phosphorylation in a HER3 phosphorylation assay, and/or pAKT phosphorylation assay, and/or ERK1/2 phosphorylation assay, all as described above.
   [0110] In one particular aspect, any 04C07-like sequence may be a humanized and/or sequence optimized sequence, as further described herein.
[0111] C) 17B05-like sequences: a “17B05-like sequence”, “17B05-like ISV” or “17B05-like building block” is defined as an ISV (as described herein) that comprises:
   [0112] a) a CDR1 which comprises or essentially consists of either (i) the amino acid sequence LNAMA (SEQ ID NO: 58) or (ii) an amino acid sequence that has only 3, 2 or 1 amino acid difference(s) (as defined herein) with the amino acid sequence LNAMA; and/or
   [0113] b) a CDR2 which comprises or essentially consists of either (i) the amino acid sequence GIFGVGSTRYADSVKG (SEQ ID NO: 88) or (ii) an amino acid sequence that has at least 80%, such as at least 85%, for example at least 90% or more than 95% sequence identity with the amino acid sequence GIFGVGSTRYADSVKG; or (iii) an amino acid sequence that has only 7, 6, 5, 4, 3, 2 or 1 amino acid difference(s) (as defined herein) with the amino acid sequence GIFGVGSTRYADSVKG; and/or
   [0114] c) a CDR3 which comprises or essentially consists of either (i) the amino acid sequence SSVTRGSSDY (SEQ ID NO: 118) or (ii) an amino acid sequence that has at least 80%, such as at least 85%, for example at least 90% or more than 95% sequence identity with the amino acid sequence SSVTRGSSDY; or (iii) an amino acid sequence that has only 7, 6, 5, 4, 3, 2 or 1 amino acid difference(s) (as defined herein) with the amino acid sequence SSVTRGSSDY;
   [0115] in which the framework sequences present in such an ISV are as further described herein, and in which CDR1, CDR2 and CDR3 are preferably such that the 17B05-like ISV has blocking activity, e.g. block HRG binding to HER3 partially or completely as described above, and/or blocking activity or inhibiting capacity of (trans)phosphorylation in a HER3 phosphorylation assay, and/or pAKT phosphorylation assay, and/or ERK1/2 phosphorylation assay and/or has a blocking or inhibiting activity of (hetero)dimerisation as determined by EGFR ligand (EGF) induced HER3 phosphorylation assay, all as described above.
   [0116] As mentioned herein, (some of the) 17B05-like sequences may be (and preferably are) such that they are capable of inhibiting or blocking (fully or partially, as further described herein) ligand binding, and in particular of inhibiting or blocking (fully or partially, as further described herein) the binding of HRG to HER3
   [0117] Preferably, in such a 17B05-like sequence, CDR1 and CDR2 are as defined under a) and b), respectively; or CDR1 and CDR3 are as defined under a) and c), respectively; or CDR2 and CDR3 are as defined under b) and c), respectively. More preferably, in such a 17B05-like sequence, CDR1, CDR2 and CDR3 are all as defined under a), b) and c), respectively. Again, in such an 17B05-like sequence, CDR1, CDR2 and CDR3 are preferably such that the 17B05-like ISV has blocking activity, e.g. block HRG binding to HER3 partially or completely as described above, and/or blocking activity or inhibiting capacity of (trans)phosphorylation in a HER3 phosphorylation assay, and/or pAKT phosphorylation assay, and/or ERK1/2 phosphorylation assay and/or has a blocking or inhibiting activity of (hetero)dimerisation as determined by EGFR ligand (EGF) induced HER3 phosphorylation assay, all as described above.
   [0118] For example, in such an 17B05-like sequence: CDR1 may comprise or essentially consist of the amino acid sequence LNAMA (with CDR2 and CDR3 being as defined under b) and c), respectively); and/or CDR2 may comprise or essentially consist of the amino acid sequence GIFGVGSTRYADSVKG (with CDR1 and CDR3 being as defined under a) and c), respectively); and/or CDR3 may comprise or essentially consist of the amino acid sequence SSVTRGSSDY (with CDR1 and CDR2 being as defined under a) and b), respectively). Particularly, when an 17B05-like sequence is according to this aspect: CDR1 may comprise or essentially consist of the amino acid sequence LNAMA and CDR2 may comprise or essentially consist of the amino acid sequence GIFGVGSTRYADSVKG (with CDR3 being as defined under c) above); and/or CDR1 may comprise or essentially consist of the amino acid sequence LNAMA and CDR3 may comprise or essentially consist of the amino acid sequence SSVTRGSSDY (with CDR2 being as defined under b) above); and/or CDR2 may comprise or essentially consist of the amino acid sequence GIFGVGSTRYADSVKG and CDR3 may comprise or essentially consist of the amino acid sequence SSVTRGSSDY (with CDR1 being as defined under a) above). Again, in such 17B05-like sequences, CDR1, CDR2 and CDR3 are preferably such that the 17B05-like ISV has blocking activity, e.g. block HRG binding to HER3 partially or completely as described above, and/or blocking activity or inhibiting capacity of (trans)phosphorylation in a HER3 phosphorylation assay, and/or pAKT phosphorylation assay, and/or ERK1/2 phosphorylation assay and/or has a blocking or inhibiting activity of (hetero)dimerisation as determined by EGFR ligand (EGF) induced HER3 phosphorylation assay, all as described above.
   [0119] In a specifically preferred aspect, a “17B05-like sequence”, “17B05-like ISV” or “/7B05-like building block” is an ISV that comprises:
   [0120] d) a CDR1 which is either (i) the amino acid sequence LNAMA or (ii) an amino acid sequence that has only 3, 2 or 1 amino acid difference(s) (as defined herein) with the amino acid sequence LNAMA; and/or
   [0121] e) a CDR2 which is either (i) the amino acid sequence GIFGVGSTRYADSVKG or (ii) an amino acid sequence that has at least 80%, such as at least 85%, for example at least 90% or more than 95% sequence identity with the amino acid sequence GIFGVGSTRYADSVKG; or (iii) an amino acid sequence that has only 7, 6, 5, 4, 3, 2 or 1 amino acid difference(s) (as defined herein) with the amino acid sequence GIFGVGSTRYADSVKG; and/or

[0122] f) a CDR3 which is either (i) the amino acid sequence SSVTRGSSDY or (ii) an amino acid sequence that has at least 80%, such as at least 85%, for example at least 90% or more than 95% sequence identity with the amino acid sequence SSVTRGSSDY; or (iii) an amino acid sequence that has only 7, 6, 5, 4, 3, 2 or 1 amino acid difference(s) (as defined herein) with the amino acid sequence SSVTRGSSDY;
[0123] in which the framework sequences present in such an ISV are as further described herein, and in which CDR1, CDR2 and CDR3 are preferably such that the 17B05-like ISV has blocking activity, e.g. block HRG binding to HER3 partially or completely as described above, and/or blocking activity or inhibiting capacity of (trans)phosphorylation in a HER3 phosphorylation assay, and/or pAKT phosphorylation assay, and/or ERK1/2 phosphorylation assay and/or has a blocking or inhibiting activity of (hetero)dimerisation as determined by EGFR ligand (EGF) induced HER3 phosphorylation assay, all as described above.
[0124] Preferably, in a 17B05-like sequence according to this specifically preferred aspect, CDR1 and CDR2 are as defined under d) and e), respectively; or CDR1 and CDR3 are as defined under d) and f), respectively; or CDR2 and CDR3 are as defined under e) and f), respectively. More preferably, in such a 17B05-like sequence, CDR1, CDR2 and CDR3 are all as defined under d), e) and f), respectively. Again, in such an 17B05-like sequence, CDR1, CDR2 and CDR3 are preferably such that the 17B05-like ISV has blocking activity, e.g. block HRG binding to HER3 partially or completely as described above, and/or blocking activity or inhibiting capacity of (trans)phosphorylation in a HER3 phosphorylation assay, and/or pAKT phosphorylation assay, and/or ERK1/2 phosphorylation assay and/or has a blocking or inhibiting activity of (hetero)dimerisation as determined by EGFR ligand (EGF) induced HER3 phosphorylation assay, all as described above.
[0125] For example, in a 17B05-like sequence according to this specifically preferred aspect: CDR1 is the amino acid sequence LNAMA (with CDR2 and CDR3 being as defined under e) and f), respectively); and/or CDR2 is the amino acid sequence GIFGVGSTRYADSVKG (with CDR1 and CDR3 being as defined under d) and f), respectively); and/or CDR3 is the amino acid sequence SSVTRGSSDY (with CDR1 and CDR2 being as defined under d) and e), respectively). Particularly, when an 17B05-like sequence is according to this aspect: CDR1 is the amino acid sequence LNAMA and CDR2 is the amino acid sequence GIFGVGSTRYADSVKG (with CDR3 being as defined under f) above); and/or CDR1 is the amino acid sequence LNAMA and CDR3 is the amino acid sequence SSVTRGSSDY (with CDR2 being as defined under e) above); and/or CDR2 is the amino acid sequence GIFGVGSTRYADSVKG and CDR3 is SSVTRGSSDY (with CDR1 being as defined under d) above). Again, in such 17B05-like sequences, CDR1, CDR2 and CDR3 are preferably such that the 17B05-like ISV has blocking activity, e.g. block HRG binding to HER3 partially or completely as described above, and/or blocking activity or inhibiting capacity of (trans)phosphorylation in a HER3 phosphorylation assay, and/or pAKT phosphorylation assay, and/or ERK1/2 phosphorylation assay and/or has a blocking or inhibiting activity of (hetero)dimerisation as determined by EGFR ligand (EGF) induced HER3 phosphorylation assay, all as described above.

[0126] In a particularly preferred 17B05-like sequence: CDR1 is the amino acid sequence LNAMA, CDR2 is the amino acid sequence GIFGVGSTRYADSVKG; and CDR3 is the amino acid sequence SSVTRGSSDY.

[0127] In all the 17B05-like sequence described in this paragraph C), the framework sequences may be as further described herein. Preferably, the framework sequences are such that the framework sequences have at least 80%, such as at least 85%, for example at least 90%, such as at least 95% sequence identity with the framework sequences of 17B05 (which, for example, can be determined by determining the overall degree of sequence identity of a given sequence with the sequence of 17B05 while disregarding the CDR's in the calculation). Again, the combination of CDR's and frameworks present in a given sequence are preferably such that the resulting 17B05-like ISV has blocking activity, e.g. block HRG binding to HER3 partially or completely as described above, and/or blocking activity or inhibiting capacity of (trans)phosphorylation in a HER3 phosphorylation assay, and/or pAKT phosphorylation assay, and/or ERK1/2 phosphorylation assay and/or has a blocking or inhibiting activity of (hetero)dimerisation as determined by EGFR ligand (EGF) induced HER3 phosphorylation assay, all as described above.

[0128] In one specific aspect, a 17B05-like sequence is an ISV that has at least 70%, such at least 80%, for example at least 85%, such as at least 90% or more than 95% sequence identity with the amino acid sequence 17B05 (SEQ ID NO: 13). For example, in an 17B05-like sequence according to this aspect, the CDR's may be according to the specifically preferred aspect described above, and may in particularly (but without limitation) be LNAMA (CDR1); GIFGVGSTRYADSVKG (CDR2); and SSVTRGSSDY (CDR3). Again, preferably, the combination of CDR's and frameworks present in such a 17B05-like ISV are preferably such that the resulting 17B05-like ISV has blocking activity, e.g. block HRG binding to HER3 partially or completely as described above, and/or blocking activity or inhibiting capacity of (trans)phosphorylation in a HER3 phosphorylation assay, and/or pAKT phosphorylation assay, and/or ERK1/2 phosphorylation assay and/or has a blocking or inhibiting activity of (hetero)dimerisation as determined by EGFR ligand (EGF) induced HER3 phosphorylation assay, all as described above. In one particular aspect, any 17B05-like sequence may be a humanized and/or sequence optimized sequence, as further described herein.
[0129] D) 18G11-like sequences: a “18G11-like sequence”, “18G11-like ISV” or “18G11-like building block” is defined as an ISV (as described herein) that comprises:
   [0130] a) a CDR1 which comprises or essentially consists of either (i) the amino acid sequence INAMG (SEQ ID NO: 61) or (ii) an amino acid sequence that has only 3, 2 or 1 amino acid difference(s) (as defined herein) with the amino acid sequence INAMG; and/or
   [0131] b) a CDR2 which comprises or essentially consists of either (i) the amino acid sequence LITSSDTTDYAESVEG (SEQ ID NO: 91) or (ii) an amino acid sequence that has at least 80%, such as at least 85%, for example at least 90% or more than 95% sequence identity with the amino acid sequence LITSSDTTDYAESVEG; or (iii) an amino acid sequence that has only 7, 6, 5, 4, 3, 2 or 1 amino acid difference(s) (as defined herein) with the amino acid sequence LITSSDTTDYAESVEG; and/or
   [0132] c) a CDR3 which comprises or essentially consists of either (i) the amino acid sequence DHYSMGVPEKRVIM (SEQ ID NO: 121) or (ii) an amino acid sequence that has at least 80%, such as at least 85%, for example at least 90% or more than 95% sequence identity with the amino acid sequence DHYSMGVPEKRVIM; or (iii) an amino acid sequence that has only 7, 6, 5, 4, 3, 2 or 1 amino acid difference(s) (as defined herein) with the amino acid sequence DHYSMGVPEKRVIM;
   [0133] in which the framework sequences present in such an ISV are as further described herein, and in which CDR1, CDR2 and CDR3 are preferably such that the 18G11-like ISV has domain II binding activity, blocking activity or inhibiting capacity of phosphorylation in a HER3 phosphorylation assay and/or pAKT phosphorylation assay, all as described above above.
   [0134] As mentioned herein, (some of the) 18G11-like sequences may have an effect (which may be limited/partial or more pronounced) on either ligand/HRG binding (in particular, they may to a limited/partial extent be capable of inhibiting or blocking the binding of ligand/HRG to HER3) and/or on the (hetero)dimerization of HER3.
   [0135] Preferably, in such a 18G11-like sequence, CDR1 and CDR2 are as defined under a) and b), respectively; or CDR1 and CDR3 are as defined under a) and c), respectively; or CDR2 and CDR3 are as defined under b) and c), respectively. More preferably, in such a 18G11-like sequence, CDR1, CDR2 and CDR3 are all as defined under a), b) and c), respectively. Again, in such an 18G11-like sequence, CDR1, CDR2 and CDR3 are preferably such that the 18G11-like ISV has domain II binding activity, blocking activity or inhibiting capacity of phosphorylation in a HER3 phosphorylation assay and/or pAKT phosphorylation assay, all as described above.
   [0136] For example, in such an 18G11-like sequence: CDR1 may comprise or essentially consist of the amino acid sequence INAMG (with CDR2 and CDR3 being as defined under b) and c), respectively); and/or CDR2 may comprise or essentially consist of the amino acid sequence LITSSDTTDYAESVEG (with CDR1 and CDR3 being as defined under a) and c), respectively); and/or CDR3 may comprise or essentially consist of the amino acid sequence DHYSMGVPEKRVIM (with CDR1 and CDR2 being as defined under a) and b), respectively). Particularly, when an 18G11-like sequence is according to this aspect: CDR1 may comprise or essentially consist of the amino acid sequence INAMG and CDR2 may comprise or essentially consist of the amino acid sequence LITSSDTTDYAESVEG (with CDR3 being as defined under c) above); and/or CDR1 may comprise or essentially consist of the amino acid sequence INAMG and CDR3 may comprise or essentially consist of the amino acid sequence DHYSMGVPEKRVIM (with CDR2 being as defined under b) above); and/or CDR2 may comprise or essentially consist of the amino acid sequence LITSSDTTDYAESVEG and CDR3 may comprise or essentially consist of the amino acid sequence DHYSMGVPEKRVIM (with CDR1 being as defined under a) above). Again, in such 18G11-like sequences, CDR1, CDR2 and CDR3 are preferably such that the 18G11-like ISV has domain II binding activity, blocking activity or inhibiting capacity of phosphorylation in a HER3 phosphorylation assay and/or pAKT phosphorylation assay, all as described above.
   [0137] In a specifically preferred aspect, a “18G11-like sequence”, “18G11-like ISV” or “18G11-like building block” is an ISV that comprises:
   [0138] d) a CDR1 which is either (i) the amino acid sequence INAMG or (ii) an amino acid sequence that has only 3, 2 or 1 amino acid difference(s) (as defined herein) with the amino acid sequence INAMG; and/or
   [0139] e) a CDR2 which is either (i) the amino acid sequence LITSSDTTDYAESVEG or (ii) an amino acid sequence that has at least 80%, such as at least 85%, for example at least 90% or more than 95% sequence identity with the amino acid sequence LITSSDTTDYAESVEG; or (iii) an amino acid sequence that has only 7, 6, 5, 4, 3, 2 or 1 amino acid difference(s) (as defined herein) with the amino acid sequence LITSSDTTDYAESVEG; and/or
   [0140] f) a CDR3 which is either (i) the amino acid sequence DHYSMGVPEKRVIM or (ii) an amino acid sequence that has at least 80%, such as at least 85%, for example at least 90% or more than 95% sequence identity with the amino acid sequence DHYSMGVPEKRVIM; or (iii) an amino acid sequence that has only 7, 6, 5, 4, 3, 2 or 1 amino acid difference(s) (as defined herein) with the amino acid sequence DHYSMGVPEKRVIM;
   [0141] in which the framework sequences present in such an ISV are as further described herein, and in which CDR1, CDR2 and CDR3 are preferably such that the 18G11-like ISV has domain II binding activity, blocking activity or inhibiting capacity of phosphorylation in a HER3 phosphorylation assay and/or pAKT phosphorylation assay, all as described above above.
   [0142] Preferably, in a 18G11-like sequence according to this specifically preferred aspect, CDR1 and CDR2 are as defined under d) and e), respectively; or CDR1 and CDR3 are as defined under d) and f), respectively; or CDR2 and CDR3 are as defined under e) and f), respectively. More preferably, in such a 18G11-like sequence, CDR1, CDR2 and CDR3 are all as defined under d), e) and f), respectively. Again, in such an 18G11-like sequence, CDR1, CDR2 and CDR3 are preferably such that the 18G11-like ISV has domain II binding activity, blocking activity or inhibiting capacity of phosphorylation in a HER3 phosphorylation assay and/or pAKT phosphorylation assay, all as described above. For example, in a 18G11-like sequence according to this specifically preferred aspect: CDR1 is the amino acid sequence INAMG (with CDR2 and CDR3 being as defined under e) and f), respectively); and/or CDR2 is the amino acid sequence LITSSDTTDYAESVEG (with CDR1 and CDR3 being as defined under d) and f), respectively); and/or CDR3 is the amino acid sequence DHYSMGVPEKRVIM (with CDR1 and CDR2 being as defined under d) and e), respectively). Particularly, when an 18G11-like sequence is according to this aspect: CDR1 is the amino acid sequence INAMG and CDR2 is the amino acid sequence LITSSDTTDYAESVEG (with CDR3 being as defined under f) above); and/or CDR1 is the amino acid sequence INAMG and CDR3 is the amino acid sequence DHYSMGVPEKRVIM (with CDR2 being as defined under e) above); and/or CDR2 is the amino acid sequence LITSSDTTDYAESVEG and CDR3 is DHYSMGVPEKRVIM (with CDR1 being as defined under d) above). Again, in such 18G11-like sequences, CDR1, CDR2 and CDR3 are preferably such that the 18G11-like ISV has domain II binding activity, blocking activity or inhibiting capacity of phosphorylation in a HER3 phosphorylation assay and/or pAKT phosphorylation assay, all as described above.
   [0143] In a particularly preferred 18G11-like sequence: CDR1 is the amino acid sequence INAMG, CDR2 is the amino acid sequence LITSSDTTDYAESVEG; and CDR3 is the amino acid sequence DHYSMGVPEKRVIM.
   [0144] In all the 18G11-like sequence described in this paragraph D), the framework sequences may be as further described herein. Preferably, the framework sequences are such that the framework sequences have at least 80%, such as at least 85%, for example at least 90%, such as at least 95% sequence identity with the framework sequences of 18G11 (which, for example, can be determined by determining the overall degree of sequence identity of a given sequence with the sequence of 18G11 while disregarding the CDR's in the calculation). Again, the combination of CDR's and frameworks present in a given sequence are preferably such that the resulting 18G11-like ISV has domain II binding activity, blocking activity or inhibiting capacity of phosphorylation in a HER3 phosphorylation assay and/or pAKT phosphorylation assay, all as described above. In one specific aspect, a 18G11-like sequence is an ISV that has at least 70%, such at least 80%, for example at least 85%, such as at least 90% or more than 95% sequence identity with the amino acid sequence 18G11 (SEQ ID NO: 16). For example, in an 18G11-like sequence according to this aspect, the CDR's may be according to the specifically preferred aspect described above, and may in particularly (but without limitation) be INAMG (CDR1); LITSSDTTDYAESVEG (CDR2); and DHYSMGVPEKRVIM (CDR3). Again, preferably, the combination of CDR's and frameworks present in such a 18G11-like ISV are preferably such that the resulting 18G11-like ISV has domain II binding activity, blocking activity or inhibiting capacity of phosphorylation in a HER3 phosphorylation assay and/or pAKT phosphorylation assay, all as described above.
   [0145] In one particular aspect, any 18G11-like sequence may be a humanized and/or sequence optimized sequence, as further described herein.
[0146] E) 34C07-like sequences: a “34C07-like sequence”, “34C07-like ISV” or “34C07-like building block” is defined as an ISV (as described herein) that comprises:
   [0147] a) a CDR1 which comprises or essentially consists of either (i) the amino acid sequence INAMA (SEQ ID NO: 63) or (ii) an amino acid sequence that has only 3, 2 or 1 amino acid difference(s) (as defined herein) with the amino acid sequence INAMA; and/or
   [0148] b) a CDR2 which comprises or essentially consists of either (i) the amino acid sequence EITAGGSTNYADSVKG (SEQ ID NO: 93) or (ii) an amino acid sequence that has at least 80%, such as at least 85%, for example at least 90% or more than 95% sequence identity with the amino acid sequence EITAGGSTNYADSVKG; or (iii) an amino acid sequence that has only 7, 6, 5, 4, 3, 2 or 1 amino acid difference(s) (as defined herein) with the amino acid sequence EITAGGSTNYADSVKG; and/or
   [0149] c) a CDR3 which comprises or essentially consists of either (i) the amino acid sequence DHYTTWDRRSAY (SEQ ID NO: 123) or (ii) an amino acid sequence that has at least 80%, such as at least 85%, for example at least 90% or more than 95% sequence identity with the amino acid sequence DHYTTWDRRSAY; or (iii) an amino acid sequence that has only 7, 6, 5, 4, 3, 2 or 1 amino acid difference(s) (as defined herein) with the amino acid sequence DHYTTWDRRSAY;
   [0150] in which the framework sequences present in such an ISV are as further described herein, and in which CDR1, CDR2 and CDR3 are preferably such that the 34C07-like ISV has domain II binding activity, blocking activity or inhibiting capacity of phosphorylation in a HER3 phosphorylation assay, and/or pAKT phosphorylation assay, and/or ERK1/2 phosphorylation assay, all as described above.
   [0151] As mentioned herein, (some of the) 34C07-like sequences may have an effect (which may be limited/partial or more pronounced) on either ligand/HRG binding (in particular, they may to a limited/partial extent be capable of inhibiting or blocking the binding of ligand/HRG to HER3) and/or on the (hetero)dimerization of HER3. In particular, they may to a limited extent be capable of inhibiting ligand/HRG binding to HER3. Preferably, in such a 34C07-like sequence, CDR1 and CDR2 are as defined under a) and b), respectively; or CDR1 and CDR3 are as defined under a) and c), respectively; or CDR2 and CDR3 are as defined under b) and c), respectively. More preferably, in such a 34C07-like sequence, CDR1, CDR2 and CDR3 are all as defined under a), b) and c), respectively. Again, in such an 34C07-like sequence, CDR1, CDR2 and CDR3 are preferably such that the 34C07-like ISV has domain II binding activity, blocking activity or inhibiting capacity of phosphorylation in a HER3 phosphorylation assay, and/or pAKT phosphorylation assay, and/or ERK1/2 phosphorylation assay, all as described above above.
   [0152] For example, in such an 34C07-like sequence: CDR1 may comprise or essentially consist of the amino acid sequence INAMA (with CDR2 and CDR3 being as defined under b) and c), respectively); and/or CDR2 may comprise or essentially consist of the amino acid sequence EITAGGSTNYADSVKG (with CDR1 and CDR3 being as defined under a) and c), respectively); and/or CDR3 may comprise or essentially consist of the amino acid sequence DHYTTWDRRSAY (with CDR1 and CDR2 being as defined under a) and b), respectively). Particularly, when an 34C07-like sequence is according to this aspect: CDR1 may comprise or essentially consist of the amino acid sequence INAMA and CDR2 may comprise or essentially consist of the amino acid sequence EITAGGSTNYADSVKG (with CDR3 being as defined under c) above); and/or CDR1 may comprise or essentially consist of the amino acid sequence INAMA and CDR3 may comprise or essentially consist of the amino acid sequence DHYTTWDRRSAY (with CDR2 being as defined under b) above); and/or CDR2 may comprise or essentially consist of the amino acid sequence EITAGGSTNYADSVKG and CDR3 may comprise or essentially consist of the amino acid sequence DHYTTWDRRSAY (with CDR1 being as defined under a) above). Again, in such 34C07-like sequences, CDR1, CDR2 and CDR3 are preferably such that the 34C07-like ISV has domain II binding activity, blocking activity or inhibiting capacity of phosphorylation in a HER3 phosphorylation assay, and/or pAKT phosphorylation assay, and/or ERK1/2 phosphorylation assay, all as described above.
   [0153] In a specifically preferred aspect, a “34C07-like sequence”, “34C07-like ISV” or “34C07-like building block” is an ISV that comprises:
   [0154] d) a CDR1 which is either (i) the amino acid sequence INAMA or (ii) an amino acid sequence that has only 3, 2 or 1 amino acid difference(s) (as defined herein) with the amino acid sequence INAMA; and/or
   [0155] e) a CDR2 which is either (i) the amino acid sequence EITAGGSTNYADSVKG or (ii) an amino acid sequence that has at least 80%, such as at least 85%, for example at least 90% or more than 95% sequence identity with the amino acid sequence EITAGGSTNYADSVKG; or (iii) an amino acid sequence that has only 7, 6, 5, 4, 3, 2 or 1 amino acid difference(s) (as defined herein) with the amino acid sequence EITAGGSTNYADSVKG; and/or
   [0156] f) a CDR3 which is either (i) the amino acid sequence DHYTTWDRRSAY or (ii) an amino acid sequence that has at least 80%, such as at least 85%, for example at least 90% or more than 95% sequence identity with the amino acid sequence DHYTTWDRRSAY; or (iii) an amino acid sequence that has only 7, 6, 5, 4, 3, 2 or 1 amino acid difference(s) (as defined herein) with the amino acid sequence DHYTTWDRRSAY;
   [0157] in which the framework sequences present in such an ISV are as further described herein, and in which CDR1, CDR2 and CDR3 are preferably such that the 34C07-like ISV has domain II binding activity, blocking activity or inhibiting capacity of phosphorylation in a HER3 phosphorylation assay, and/or pAKT phosphorylation assay, and/or ERK1/2 phosphorylation assay, all as described above.
   [0158] Preferably, in a 34C07-like sequence according to this specifically preferred aspect, CDR1 and CDR2 are as defined under d) and e), respectively; or CDR1 and CDR3 are as defined under d) and f), respectively; or CDR2 and CDR3 are as defined under e) and f), respectively. More preferably, in such a 34C07-like sequence, CDR1, CDR2 and CDR3 are all as defined under d), e) and f), respectively. Again, in such an 34C07-like sequence, CDR1, CDR2 and CDR3 are preferably such that the 34C07-like ISV has domain II binding activity, blocking activity or inhibiting capacity of phosphorylation in a HER3 phosphorylation assay, and/or pAKT phosphorylation assay, and/or ERK1/2 phosphorylation assay, all as described above.
   [0159] For example, in a 34C07-like sequence according to this specifically preferred aspect: CDR1 is the amino acid sequence INAMA (with CDR2 and CDR3 being as defined under e) and f), respectively); and/or CDR2 is the amino acid sequence EITAGGSTNYADSVKG (with CDR1 and CDR3 being as defined under d) and f), respectively); and/or CDR3 is the amino acid sequence DHYTTWDRRSAY (with CDR1 and CDR2 being as defined under d) and e), respectively). Particularly, when an 34C07-like sequence is according to this aspect: CDR1 is the amino acid sequence INAMA and CDR2 is the amino acid sequence EITAGGSTNYADSVKG (with CDR3 being as defined under f) above); and/or CDR1 is the amino acid sequence INAMA and CDR3 is the amino acid sequence DHYTTWDRRSAY (with CDR2 being as defined under e) above); and/or CDR2 is the amino acid sequence EITAGGSTNYADSVKG and CDR3 is DHYTTWDRRSAY (with CDR1 being as defined under d) above). Again, in such 34C07-like sequences, CDR1, CDR2 and CDR3 are preferably such that the 34C07-like ISV has domain II binding activity, blocking activity or inhibiting capacity of phosphorylation in a HER3 phosphorylation assay, and/or pAKT phosphorylation assay, and/or ERK1/2 phosphorylation assay, all as described above.
   [0160] In a particularly preferred 34C07-like sequence: CDR1 is the amino acid sequence INAMA, CDR2 is the amino acid sequence EITAGGSTNYADSVKG; and CDR3 is the amino acid sequence DHYTTWDRRSAY.
   [0161] In all the 34C07-like sequence described in this paragraph E), the framework sequences may be as further described herein. Preferably, the framework sequences are such that the framework sequences have at least 80%, such as at least 85%, for example at least 90%, such as at least 95% sequence identity with the framework sequences of 34C07 (which, for example, can be determined by determining the overall degree of sequence identity of a given sequence with the sequence of 34C07 while disregarding the CDR's in the calculation). Again, the combination of CDR's and frameworks present in a given sequence are preferably such that the resulting 34C07-like ISV has domain II binding activity, blocking activity or inhibiting capacity of phosphorylation in a HER3 phosphorylation assay, and/or pAKT phosphorylation assay, and/or ERK1/2 phosphorylation assay, all as described above.
   [0162] In one specific aspect, a 34C07-like sequence is an ISV that has at least 70%, such at least 80%, for example at least 85%, such as at least 90% or more than 95% sequence identity with the amino acid sequence 34C07 (SEQ ID NO: 18). For example, in an 34C07-like sequence according to this aspect, the CDR's may be according to the specifically preferred aspect described above, and may in particularly (but without limitation) be INAMA (CDR1); EITAGGSTNYADSVKG (CDR2); and DHYTTWDRRSAY (CDR3). Again, preferably, the combination of CDR's and frameworks present in such a 34C07-like ISV are preferably such that the resulting 34C07-like ISV has domain II binding activity, blocking activity or inhibiting capacity of phosphorylation in a HER3 phosphorylation assay, and/or pAKT phosphorylation assay, and/or ERK1/2 phosphorylation assay, all as described above.
   [0163] In one particular aspect, any 34C07-like sequence may be a humanized and/or sequence optimized sequence, as further described herein.
   [0164] In one particular aspect, any 34C07-like sequence may be a humanized and/or sequence optimized sequence, as further described herein.

[0165] All of the amino acid sequences of the invention as described herein (including those according to specific aspects mentioned herein, such as the aspects mentioned in the preceding paragraph) that can bind to HER3 with an affinity (suitably measured and/or expressed as a K_{D}-value (actual or apparent), a K_{A}-value (actual or apparent), a kₒₙ-rate and/or a k_{off}-rate, or alternatively as an IC₅₀ value, as further described herein) that is as defined herein; as well as compounds and constructs, and in particular proteins and polypeptides, that comprise at least one such amino acid sequence.

[0166] In particular, the amino acid sequences and polypeptides of the invention are preferably such that they:
[0167] bind to HER3 with a dissociation constant (K_{D}) of 10⁻⁵ to 10⁻¹² moles/liter or less, and preferably 10⁻⁷ to 10⁻¹² moles/liter or less and more preferably 10⁻⁸ to 10⁻¹² moles/liter (i.e. with an association constant (K_{A}) of 10⁵ to 10¹² liter/moles or more, and preferably 10⁷ to 10¹² liter/moles or more and more preferably 10⁸ to 10¹² liter/moles);
   and/or such that they:
[0168] bind to HER3 with a kₒₙ-rate of between 10² M⁻¹s⁻¹ to about 10⁷ M⁻¹s⁻¹, preferably between 10³ M⁻¹s⁻¹ and 10⁷ M⁻¹s⁻¹, more preferably between 10⁴ M⁻¹s⁻¹ and 10⁷ M⁻, such as between 10⁵ M⁻¹s⁻¹ and 10⁷ M⁻¹s⁻¹;
   and/or such that they:
[0169] bind to HER3 with a k_{off} rate between 1 s⁻¹ (t_{1/2}=0.69 s) and 10⁻⁶ s⁻¹ (providing a near irreversible complex with a t_{1/2} of multiple days), preferably between 10⁻² s⁻¹ and 10⁻⁶ s⁻¹, more preferably between 10⁻³ s⁻¹ and 10⁻⁶ s⁻¹, such as between 10⁻⁴ s⁻¹ and 10⁻⁶ s⁻¹.

[0170] Preferably, a monovalent amino acid sequence of the invention (or a polypeptide that contains only one amino acid sequence of the invention) is such that it will bind to HER3 with an affinity less than 500 nM, preferably less than 200 nM, more preferably less than 10 nM, such as less than 500 pM.

[0171] Some preferred IC50 values for binding of the amino acid sequences or polypeptides of the invention to HER3 will become clear from the further description and examples herein.

[0172] For binding to HER3, an amino acid sequence of the invention will usually contain within its amino acid sequence one or more amino acid residues or one or more stretches of amino acid residues (i.e. with each “stretch” comprising two or more amino acid residues that are adjacent to each other or in close proximity to each other, i.e. in the primary or tertiary structure of the amino acid sequence) via which the amino acid sequence of the invention can bind to HER3, which amino acid residues or stretches of amino acid residues thus form the “site” for binding to HER3 (also referred to herein as the “antigen binding site”).

[0173] The amino acid sequences provided by the invention are preferably in essentially isolated form (as defined herein), or form part of a protein or polypeptide of the invention (as defined herein), which may comprise or essentially consist of one or more amino acid sequences of the invention and which may optionally further comprise one or more further amino acid sequences (all optionally linked via one or more suitable linkers). For example, and without limitation, the one or more amino acid sequences of the invention may be used as a binding unit in such a protein or polypeptide, which may optionally contain one or more further amino acid sequences that can serve as a binding unit (i.e. against one or more other targets than HER3), so as to provide a monovalent, multivalent or multispecific polypeptide of the invention, respectively, all as described herein. Such a protein or polypeptide may also be in essentially isolated form (as defined herein).

[0174] The amino acid sequences and polypeptides of the invention as such preferably essentially consist of a single amino acid chain that is not linked via disulphide bridges to any other amino acid sequence or chain (but that may or may not contain one or more intramolecular disulphide bridges. For example, it is known that immunoglobulin single variable domains and/or Nanobodies—as described herein—may sometimes contain a disulphide bridge between CDR3 and CDR1 or FR2). However, it should be noted that one or more amino acid sequences of the invention may be linked to each other and/or to other amino acid sequences (e.g. via disulphide bridges) to provide peptide constructs that may also be useful in the invention (for example Fab′ fragments, F(ab′)₂ fragments, ScFv constructs, “diabodies” and other multispecific constructs. Reference is for example made to the review by Holliger and Hudson, Nat. Biotechnol. 2005 September; 23(9):1126-36).

[0175] Generally, when an amino acid sequence of the invention (or a compound, construct or polypeptide comprising the same) is intended for administration to a subject (for example for therapeutic and/or diagnostic purposes as described herein), it is preferably either an amino acid sequence that does not occur naturally in said subject; or, when it does occur naturally in said subject, in essentially isolated form (as defined herein).

[0176] It will also be clear to the skilled person that for pharmaceutical use, the amino acid sequences of the invention (as well as compounds, constructs and polypeptides comprising the same) are preferably directed against human HER3; whereas for veterinary purposes, the amino acid sequences and polypeptides of the invention are preferably directed against HER3 from the species to be treated, or at at least cross-reactive with HER3 from the species to be treated.

[0177] Furthermore, an amino acid sequence of the invention may optionally, and in addition to the at least one binding site for binding against HER3, contain one or more further binding sites for binding against other antigens, proteins or targets.

[0178] The efficacy of the amino acid sequences and polypeptides of the invention, and of compositions comprising the same, can be tested using any suitable in vitro assay, cell-based assay, in vivo assay and/or animal model known per se, or any combination thereof, depending on the specific disease or disorder involved. Suitable assays and animal models will be clear to the skilled person, and for example include [ligand dependent HER3 phosphorylation (Wallasch et. Al. (1995) EMBO J. 14(17): 4267-4275), and xenograft tumor models (Schoeberl et. al. (2009) Sci. Signal. 2(77): ra 31)], as well as the assays and animal models used in the experimental part below and in the prior art cited herein.

[0179] Also, according to the invention, amino acid sequences and polypeptides that are directed against HER3 from a first species of warm-blooded animal may or may not show cross-reactivity with HER3 from one or more other species of warm-blooded animal. For example, amino acid sequences and polypeptides directed against human HER3 may or may not show cross reactivity with HER3 from one or more other species of primates (such as, without limitation, monkeys from the genus Macaca (such as, and in particular, cynomolgus monkeys (Macaca fascicularis) and/or rhesus monkeys (Macaca mulatta)) and baboon (Papio ursinus)) and/or with HER3 from one or more species of animals that are often used in animal models for diseases (for example mouse, rat, rabbit, pig or dog), and in particular in animal models for diseases and disorders associated with HER3 (such as the species and animal models mentioned herein). In this respect, it will be clear to the skilled person that such cross-reactivity, when present, may have advantages from a drug development point of view, since it allows the amino acid sequences and polypeptides against human HER3 to be tested in such disease models.

[0180] More generally, amino acid sequences and polypeptides of the invention that are cross-reactive with HER3 from multiple species of mammal will usually be advantageous for use in veterinary applications, since it will allow the same amino acid sequence or polypeptide to be used across multiple species. Thus, it is also encompassed within the scope of the invention that amino acid sequences and polypeptides directed against HER3 from one species of animal (such as amino acid sequences and polypeptides against human HER3) can be used in the treatment of another species of animal, as long as the use of the amino acid sequences and/or polypeptides provide the desired effects in the species to be treated.

[0181] The present invention is in its broadest sense also not particularly limited to or defined by a specific antigenic determinant, epitope, part, domain, subunit or confirmation (where applicable) of HER3 against which the amino acid sequences and polypeptides of the invention are directed. For example, the amino acid sequences and polypeptides may or may not be directed against an “interaction site” (as defined herein). However, it is generally assumed and preferred that the amino acid sequences and polypeptides of the invention are preferably directed against an interaction site (as defined herein), and in particular against Heregulin binding site and/or heterodimerization site (see Hsieh and Moasser, supra). Thus, as further described herein, in one preferred, but non-limiting aspect, the amino acid sequences and polypeptides of the invention are directed against the HER3 ligand binding site and/or against the heterodimerization site of HER3, and are as further defined herein. It is noted that other HER3 ligands have been described besides Heregulin (Sithanandam and Anderson (2008) Cancer Gene Therapy, supra). Thus, in another preferred, but non limiting aspect, the amino acid sequences and polypeptides of the invention are directed against the Heregulin (also referred to herein as “HRG”) binding site and/or against the heterodimerization site of HER3. As mentioned above, amino acid sequences of the invention that are directed against the HRG binding site are also referred to herein as “HRG-blocking amino acid sequences”, “HRG-blocking building blocks” or, when they are ISV's, “HRG-blocking ISV's”. Amino acid sequences of the invention that are directed against the HRG binding site (and that most preferably are also capable of inhibiting or blocking HER3 heterodimerization, as further described herein) are also referred to herein as “dimerisation-blocking amino acid sequences”,“dimerisation-blocking building blocks” or, when they are ISV's, “dimerisation-blocking ISV's”.

[0182] As further described herein, a polypeptide of the invention may contain two or more amino acid sequences of the invention that are directed against HER3 and in a preferred aspect contain two different amino acid sequences such as immunoglobulin single variable domains that are directed against HER3. Generally, such polypeptides will bind to HER3 with increased avidity compared to a single amino acid sequence of the invention. Such a polypeptide may for example comprise two amino acid sequences of the invention that are directed against the same antigenic determinant, epitope, part, domain, subunit or confirmation (where applicable) of HER3 (which may or may not be an interaction site); or comprise at least one “first” amino acid sequence of the invention that is directed against a first same antigenic determinant, epitope, part, domain, subunit or confirmation (where applicable) of HER3 (which may e.g. be the Heregulin interaction site); and at least one “second” amino acid sequence of the invention that is directed against a second antigenic determinant, epitope, part, domain, subunit or confirmation (where applicable) different from the first (and which may be e.g. be directed against the heterodimerization site). Preferably, in such “biparatopic” polypeptides of the invention, at least one amino acid sequence of the invention is directed against an interaction site (as defined herein), although the invention in its broadest sense is not limited thereto.

[0183] Accordingly, and as further described herein, in one specifically advantageous but non-limiting aspect, the invention makes it possible to provide polypeptides of the invention that are both directed against the HRG binding site and also capable of blocking or inhibiting HER3 heterodimerisation, for example by combining one or more (such as one or two) HRG-blocking building blocks with one or more (such as one or two) dimerisation-blocking building blocks in a single polypeptide of the invention (which may be as further described herein).

[0184] Also, when the target (i.e. HER3) is part of a binding pair (for example, a receptor-ligand binding pair), the amino acid sequences and polypeptides may be such that they compete with the cognate binding partner (e.g. the ligand, receptor or other binding partner, as applicable) for binding to the target, and/or such that they (fully or partially) neutralize binding of the binding partner to the target. In this respect, it should again be noted that, as mentioned above, other HER3 ligands have been described besides Heregulin (Sithanandam and Anderson (2008) Cancer Gene Therapy, supra), and the amino acid sequences of the invention may (also) compete with and/or (fully or partially) neutralize binding of such ligands to HER3.

[0185] It is also within the scope of the invention that, where applicable, an amino acid sequence of the invention can bind to two or more antigenic determinants, epitopes, parts, domains, subunits or confirmations of HER3. In such a case, the antigenic determinants, epitopes, parts, domains or subunits of HER3 to which the amino acid sequences and/or polypeptides of the invention bind may be essentially the same (for example, if HER3 contains repeated structural motifs or occurs in a multimeric form) or may be different (and in the latter case, the amino acid sequences and polypeptides of the invention may bind to such different antigenic determinants, epitopes, parts, domains, subunits of HER3 with an affinity and/or specificity which may be the same or different). Also, for example, when HER3 exists in an activated conformation and in an inactive conformation, the amino acid sequences and polypeptides of the invention may bind to either one of these confirmation, or may bind to both these confirmations (i.e. with an affinity and/or specificity which may be the same or different). Also, for example, the amino acid sequences and polypeptides of the invention may bind to a conformation of HER3 in which it is bound to a pertinent ligand, may bind to a conformation of HER3 in which it not bound to a pertinent ligand, or may bind to both such conformations (again with an affinity and/or specificity which may be the same or different).

[0186] It is also expected that the amino acid sequences and polypeptides of the invention will generally bind to all naturally occurring or synthetic analogs, variants, mutants, alleles, parts and fragments of HER3; or at least to those analogs, variants, mutants, alleles, parts and fragments of HER3 that contain one or more antigenic determinants or epitopes that are essentially the same as the antigenic determinant(s) or epitope(s) to which the amino acid sequences and polypeptides of the invention bind in HER3 (e.g. in wild-type HER3). Again, in such a case, the amino acid sequences and polypeptides of the invention may bind to such analogs, variants, mutants, alleles, parts and fragments with an affinity and/or specificity that are the same as, or that are different from (i.e. higher than or lower than), the affinity and specificity with which the amino acid sequences of the invention bind to (wild-type) HER3. It is also included within the scope of the invention that the amino acid sequences and polypeptides of the invention bind to some analogs, variants, mutants, alleles, parts and fragments of HER3, but not to others.

[0187] When HER3 exists in a monomeric form and in one or more multimeric forms, it is within the scope of the invention that the amino acid sequences and polypeptides of the invention only bind to HER3 in monomeric form, only bind to HER3 in multimeric form, or bind to both the monomeric and the multimeric form. Again, in such a case, the amino acid sequences and polypeptides of the invention may bind to the monomeric form with an affinity and/or specificity that are the same as, or that are different from (i.e. higher than or lower than), the affinity and specificity with which the amino acid sequences of the invention bind to the multimeric form.

[0188] Also, when HER3 can associate with other proteins or polypeptides to form protein complexes (e.g. with MET, HER1, HER2, or HER4), it is within the scope of the invention that the amino acid sequences and polypeptides of the invention bind to HER3 in its non-associated state, bind to HER3 in its associated state, or bind to both, preferably binds only or preferentially to its non-associated state and prevents in any event heterodimerization at least partially. In all these cases, the amino acid sequences and polypeptides of the invention may bind to such multimers or associated protein complexes with an affinity and/or specificity that may be the same as or different from (i.e. higher than or lower than) the affinity and/or specificity with which the amino acid sequences and polypeptides of the invention bind to HER3 in its monomeric and non-associated state.

[0189] Also, as will be clear to the skilled person, proteins or polypeptides that contain two or more amino acid sequences directed against HER3 may bind with higher avidity to HER3 than the corresponding monomeric amino acid sequence(s). For example, and without limitation, proteins or polypeptides that contain two or more amino acid sequences directed against different epitopes of HER3 may (and usually will) bind with higher avidity than each of the different monomers, and proteins or polypeptides that contain two or more amino acid sequences directed against HER3 may (and usually will) bind also with higher avidity to a multimer of HER3.

[0190] Generally, amino acid sequences and polypeptides of the invention will at least bind to those forms of HER3 (including monomeric, multimeric and associated forms) that are the most relevant from a biological and/or therapeutic point of view, as will be clear to the skilled person and are in a preferred aspect as described herein.

[0191] It is also within the scope of the invention to use parts, fragments, analogs, mutants, variants, alleles and/or derivatives of the amino acid sequences and polypeptides of the invention, and/or to use proteins or polypeptides comprising or essentially consisting of one or more of such parts, fragments, analogs, mutants, variants, alleles and/or derivatives, as long as these are suitable for the uses envisaged herein. Such parts, fragments, analogs, mutants, variants, alleles and/or derivatives will usually contain (at least part of) a functional antigen-binding site for binding against HER3; and more preferably will be capable of specific binding to HER3, and even more preferably capable of binding to HER3 with an affinity (suitably measured and/or expressed as a K_{D}-value (actual or apparent), a K_{A}-value (actual or apparent), a kₒₙ-rate and/or a k_{off}-rate, or alternatively as an IC₅₀ value, as further described herein) that is as defined herein. Some non-limiting examples of such parts, fragments, analogs, mutants, variants, alleles, derivatives, proteins and/or polypeptides will become clear from the further description herein. Additional fragments or polypeptides of the invention may also be provided by suitably combining (i.e. by linking or genetic fusion) one or more (smaller) parts or fragments as described herein.

[0192] In one specific, but non-limiting aspect of the invention, which will be further described herein, such analogs, mutants, variants, alleles, derivatives have an increased half-life in serum (as further described herein) compared to the amino acid sequence from which they have been derived. For example, an amino acid sequence of the invention may be linked (chemically or otherwise) to one or more groups or moieties that extend the half-life (such as PEG), so as to provide a derivative of an amino acid sequence of the invention with increased half-life.

[0193] In one specific, but non-limiting aspect, the amino acid sequence of the invention may be an amino acid sequence that comprises an immunoglobulin fold or may be an amino acid sequence that, under suitable conditions (such as physiological conditions) is capable of forming an immunoglobulin fold (i.e. by folding). Reference is inter alia made to the review by Halaby et al., J. (1999) Protein Eng. 12, 563-71. Preferably, when properly folded so as to form an immunoglobulin fold, such an amino acid sequence is capable of specific binding (as defined herein) to HER3; and more preferably capable of binding to HER3 with an affinity (suitably measured and/or expressed as a K_{D}-value (actual or apparent), a K_{A}-value (actual or apparent), a kₒₙ-rate and/or a k_{off}-rate, or alternatively as an IC₅₀ value, as further described herein) that is as defined herein. Also, parts, fragments, analogs, mutants, variants, alleles and/or derivatives of such amino acid sequences are preferably such that they comprise an immunoglobulin fold or are capable for forming, under suitable conditions, an immunoglobulin fold.

[0194] In particular, but without limitation, the amino acid sequences of the invention may be amino acid sequences that essentially consist of 4 framework regions (FR1 to FR4 respectively) and 3 complementarity determining regions (CDR1 to CDR3 respectively); or any suitable fragment of such an amino acid sequence (which will then usually contain at least some of the amino acid residues that form at least one of the CDR's, as further described herein).

[0195] The amino acid sequences of the invention may in particular be an immunoglobulin sequence or a suitable fragment thereof, and more in particular be an immunoglobulin single variable domain sequence or a suitable fragment thereof, such as light chain variable domain sequence (e.g. a V_{L}-sequence) or a suitable fragment thereof; or a heavy chain variable domain sequence (e.g. a V_{H}-sequence) or a suitable fragment thereof. When the amino acid sequence of the invention is a heavy chain variable domain sequence, it may be a heavy chain variable domain sequence that is derived from a conventional four-chain antibody (such as, without limitation, a V_{H} sequence that is derived from a human antibody) or be a so-called V_{HH}-sequence (as defined herein) that is derived from a so-called “heavy chain antibody” from an animal of the family of camelids such as e.g. a llama (as defined herein).

[0196] However, it should be noted that the invention is not limited as to the origin of the amino acid sequence of the invention (or of the nucleotide sequence of the invention used to express it), nor as to the way that the amino acid sequence or nucleotide sequence of the invention is (or has been) generated or obtained. Thus, the amino acid sequences of the invention may be naturally occurring amino acid sequences (from any suitable species) or synthetic or semi-synthetic amino acid sequences. In a specific but non-limiting aspect of the invention, the amino acid sequence is a naturally occurring immunoglobulin sequence (from any suitable species) or a synthetic or semi-synthetic immunoglobulin sequence, including but not limited to “humanized” (as defined herein) immunoglobulin sequences (such as partially or fully humanized mouse or rabbit immunoglobulin sequences, and in particular partially or fully humanized V_{HH} sequences or Nanobodies), “camelized” (as defined herein) immunoglobulin sequences, as well as immunoglobulin sequences that have been sequence optimized for optimal expression and/or stability and/or solubility, as well as immunoglobulin sequences that have been obtained by techniques such as affinity maturation (for example, starting from synthetic, random or naturally occurring immunoglobulin sequences), CDR grafting, veneering, combining fragments derived from different immunoglobulin sequences, PCR assembly using overlapping primers, and similar techniques for engineering immunoglobulin sequences well known to the skilled person; or any suitable combination of any of the foregoing. Reference is for example made to the standard handbooks, as well as to the further description and prior art mentioned herein.

[0197] Similarly, the nucleotide sequences of the invention may be naturally occurring nucleotide sequences or synthetic or semi-synthetic sequences, and may for example be sequences that are isolated by PCR from a suitable naturally occurring template (e.g. DNA or RNA isolated from a cell), nucleotide sequences that have been isolated from a library (and in particular, an expression library), nucleotide sequences that have been prepared by introducing mutations into a naturally occurring nucleotide sequence (using any suitable technique known per se, such as mismatch PCR), nucleotide sequence that have been prepared by PCR using overlapping primers, or nucleotide sequences that have been prepared using techniques for DNA synthesis known per se.

[0198] The amino acid sequence of the invention may in particular be a immunoglobulin singe variable domain (or an immunoglobulin singe variable domain that is suitable for use as an immunoglobulin singe variable domain), a domain antibody (or an amino acid sequence that is suitable for use as a domain antibody), a single domain antibody (or an amino acid sequence that is suitable for use as a single domain antibody), a “dAb” (or an amino acid sequence that is suitable for use as a dAb) or a Nanobody (as defined herein, and including but not limited to a V_{HH} sequence); other single variable domains, or any suitable fragment of any one thereof. For a general description of (single) domain antibodies, reference is also made to the prior art cited above, as well as to EP 0 368 684. For the term “dAb's”, reference is for example made to Ward et al. (Nature, 1989 Oct. 12; 341 (6242): 544-6), to Holt et al., Trends Biotechnol., 2003, 21(11):484-490; as well as to for example WO 06/030220, WO 06/003388 and other published patent applications of Domantis Ltd. It should also be noted that, although less preferred in the context of the present invention because they are not of mammalian origin, single domain antibodies or single variable domains can be derived from certain species of shark (for example, the so-called “IgNAR domains”, see for example WO 05/18629).

[0199] In particular, the amino acid sequence of the invention may be an immunoglobulin singe variable domain or Nanobody (as defined herein) or a suitable fragment thereof. Such Nanobodies directed against HER3 will also be referred to herein as “Nanobodies of the invention”.

[0200] For a general description of immunoglobulin singe variable domain or Nanobodies (Note: the term “immunoglobulin singe variable domain” and “Nanobodies” are used interchangeably in this application), reference is made to the further description below, as well as to the prior art cited herein. In particular, the term Nanobody is as defined in WO 08/020,079 or WO 09/068,627, and as described therein generally refers to an immunoglobulin heavy chain variable domain that has the functional and/or structural characteristics of a V_{HH} domain (e.g. a V_{H} domain from the “heavy-chain only” antibodies that occur in Camelids), and as such may in particular be a (native) V_{HH}, a humanized V_{HH} or a camelized V_{H}, such as a camelized human V_{H}.

[0201] In this respect, it should however be noted that this description and the prior art mainly described Nanobodies of the so-called “V_{H}3 class” (i.e. Nanobodies with a high degree of sequence homology to human germline sequences of the V_{H}3 class such as DP-47, DP-51 or DP-29), which Nanobodies form a preferred aspect of this invention. It should however be noted that the invention in its broadest sense generally covers any type of Nanobody directed against HER3, and for example also covers the Nanobodies belonging to the so-called “V_{H}4 class” (i.e. Nanobodies with a high degree of sequence homology to human germline sequences of the V_{H}4 class such as DP-78), as for example described in WO 07/118,670.

[0202] Generally, Nanobodies (in particular V_{HH} sequences and partially humanized Nanobodies) can in particular be characterized by the presence of one or more “Hallmark residues” (as described herein) in one or more of the framework sequences (again as further described herein).

[0203] Thus, generally, a Nanobody can be defined as an amino acid sequence with the (general) structure
[0204] FR1-CDR1-FR2-CDR2-FR3-CDR3-FR4
   in which FR1 to FR4 refer to framework regions 1 to 4, respectively, and in which CDR1 to CDR3 refer to the complementarity determining regions 1 to 3, respectively, and in which one or more of the Hallmark residues are as further defined herein.

[0205] In particular, a Nanobody can be an amino acid sequence with the (general) structure
[0206] FR1-CDR1-FR2-CDR2-FR3-CDR3-FR4
   in which FR1 to FR4 refer to framework regions 1 to 4, respectively, and in which CDR1 to CDR3 refer to the complementarity determining regions 1 to 3, respectively, and in which the framework sequences are as further defined herein.

[0207] More in particular, a Nanobody can be an amino acid sequence with the (general) structure
[0208] FR1-CDR1-FR2-CDR2-FR3-CDR3-FR4
   in which FR1 to FR4 refer to framework regions 1 to 4, respectively, and in which CDR1 to CDR3 refer to the complementarity determining regions 1 to 3, respectively, and in which:
[0209] i) preferably one or more of the amino acid residues at positions 11, 37, 44, 45, 47, 83, 84, 103, 104 and 108 according to the Kabat numbering are chosen from the Hallmark residues mentioned in Table B-2 below. In these Nanobodies, the CDR sequences are generally as further defined herein.

TABLE B-2
Hallmark Residues in Nanobodies

| Position | Human V_{H}3 | Hallmark Residues |
|---|---|---|
| 11 | L, V; | L, S, V, M, W, F, T, Q, E, A, R, G, K, Y, |
| | predominantly L | N, P, I; preferably L |
| 37 | V, I, F; | F⁽¹⁾, Y, V, L, A, H, S, I, W, C, N, G, D, T, |
| | usually V | P, preferably F⁽¹⁾ or Y |
| 44⁽⁸⁾ | G | E⁽³⁾, Q⁽³⁾, G⁽²⁾, D, A, K, R, L, P, S, V, H, T, |
| | | N, W, M, I; |
| | | preferably G⁽²⁾, E⁽³⁾ or Q⁽³⁾; most preferably |
| | | G⁽²⁾ or Q⁽³⁾. |
| 45⁽⁸⁾ | L | L⁽²⁾, R⁽³⁾, P, H, F, G, Q, S, E, T, Y, C, I, D, |
| | | V; preferably L⁽²⁾ or R⁽³⁾ |
| 47⁽⁸⁾ | W, Y | F⁽¹⁾, L⁽¹⁾ or W⁽²⁾ G, I, S, A, V, M, R, Y, E, |
| | | P, T, C, H, K, Q, N, D; preferably W⁽²⁾, |
| | | L⁽¹⁾ or F⁽¹⁾ |
| 83 | R or K; | R, K⁽⁵⁾, T, E⁽⁵⁾, Q, N, S, I, V, G, M, L, A, |
| | usually R | D, Y, H; preferably K or R; most |
| | | preferably K |
| 84 | A, T, D; | P⁽⁵⁾, S, H, L, A, V, I, T, F, D, R, Y, N, Q, |
| | predominantly A | G, E; preferably P |
| 103 | W | W⁽⁴⁾, R⁽⁶⁾, G, S, K, A, M, Y, L, F, T, N, V, |
| | | Q, P⁽⁶⁾, E, C; preferably W |
| 104 | G | G, A, S, T, D, P, N, E, C, L; preferably G |
| 108 | L, M or T; | Q, L⁽⁷⁾, R, P, E, K, S, T, M, A, H; |
| | predominantly L | preferably Q or L⁽⁷⁾ |

Notes:
⁽¹⁾In particular, but not exclusively, in combination with KERE or KQRE at positions 43-46.
⁽²⁾Usually as GLEW at positions 44-47.
⁽³⁾Usually as KERE or KQRE at positions 43-46, e.g. as KEREL, KEREF, KQREL, KQREF, KEREG, KQREW or KQREG at positions 43-47. Alternatively, also sequences such as TERE (for example TEREL), TQRE (for example TQREL), KECE (for example KECEL or KECER), KQCE (for example KQCEL), RERE (for example REREG), RQRE (for example RQREL, RQREF or RQREW), QERE (for example QEREG), QQRE, (for example QQREW, QQREL or QQREF), KGRE (for example KGREG), KDRE (for example KDREV) are possible. Some other possible, but less preferred sequences include for example DECKL and NVCEL.
⁽⁴⁾With both GLEW at positions 44-47 and KERE or KQRE at positions 43-46.
⁽⁵⁾Often as KP or EP at positions 83-84 of naturally occurring V_{HH} domains.
⁽⁶⁾In particular, but not exclusively, in combination with GLEW at positions 44-47.
⁽⁷⁾With the proviso that when positions 44-47 are GLEW, position 108 is always Q in (non-humanized) V_{HH} sequences that also contain a W at 103.
⁽⁸⁾The GLEW group also contains GLEW-like sequences at positions 44-47, such as for example GVEW, EPEW, GLER, DQEW, DLEW, GIEW, ELEW, GPEW, EWLP, GPER, GLER and ELEW.

[0210] As further described herein, when the ISV's are nanobodies, they may contain framework sequences that are generally as described on pages 258 to 297 of WO 09/068,627 (incorporated herein by reference). Some specific preferred, but non-limiting framework sequences (and preferred combinations of the same) will be clear to the skilled person based on the disclosure herein and for example includes the FR1, FR2, FR3 and FR4 sequences (and combinations thereof) that are present in the Nanobodies listed in Table A-1 (see also Table B-1), or variants thereof with only a limited number (such as less than 5, for example 4, 3, 2 or only 1 per each FR1, FR2, FR3 or FR4) of amino acid differences (as defined in WO 09/068,627 and in WO 08/020,079), which may for example be humanizing substitutions and/or other amino acid differences that have been introduced for the purpose of sequence optimisation (some non-limiting examples of both the former and the latter will be clear to the skilled person based on the disclosure herein and in WO 09/068,627 and in WO 08/020,079).

[0211] Thus, the invention also relates to such Nanobodies that can bind to (as defined herein) and/or are directed against HER3, to suitable fragments thereof, as well as to polypeptides that comprise or essentially consist of one or more of such Nanobodies and/or suitable fragments.

[0212] SEQ ID NO's: 12 to 26 (see Table A-1) give the amino acid sequences of a number of immunoglobulin single variable domains that have been raised against HER3.

TABLE A-1
Preferred Immunoglobulin single variable domains
or Nanobody sequences
(also referred herein as a sequence with a particular
name or SEQ ID NO: X, wherein X is a number
referring to the relevant amino acid sequence):

| | SEQ ID | |
|---|---|---|
| | NO: X, | |
| | wherein | |
| Name | X = | Amino acid sequence |
| 18F05 | 12 | EVQLVESGGGLVQPGGSLRLSCVASGFTFSSYWMYWVRQAPGK |
| | | GVEWVSAISPGGVERYTDSVKGRFTISRDNAKNTLYLQMNSLKS |
| | | EDTAMYYCARLTSFATPESQGTQVTVSS |
| 17B05 | 13 | EVQLVESGGGLVQPGGSLRLSCAASGSIGGLNAMAWYRQAPGK |
| | | ERELVAGIFGVGSTRYADSVKGRFTISRDIAKNTVFLQMNSLNSE |
| | | DTAVYYCRMSSVTRGSSDYWGQGTQVTVSS |
| 18B05 | 14 | EVQLVESGGGLVQAGGSLRLSCAASGLTFGSAPMGWYRQAPGK |
| | | ERELVAYISGDERIWYGDSVKGRFTISRDTTKNTLYLQMNSLKPE |
| | | DTAVYYCVSDVKVRHWGQGTQVTVSS |
| 04C07 | 15 | EVQLVESGGGLVQAGGSLRLSCAASGFTFSSYPMSWVRQAPGK |
| | | GPAWVSTVSPGGITTSYADSVKGRFTISRDNAKNTLYLQMNSLK |
| | | PEDTAVYYCLRDLNNRGQGTQVTVSS |
| 18G11 | 16 | EVQLVESGGGLVQPGGSLRLSCAASGTLFKINAMGWYRQAPGK |
| | | RRELVALITSSDTTDYAESVEGRFTISRDNTWNAVYLQMNSLKP |
| | | EDTAVYYCHSDHYSMGVPEKRVIMYGQGTQVTVSS |
| 18E08 | 17 | EVQLVESGGGLVQPGGSLRLSCAASGTLFKINAMGWYRQAPGK |
| | | QRELVALITSSDTTDYAESVEGRFTISRDNTWNAVYLQMNSLKP |
| | | EDTAVYYCHSDHYSMGVPEKRVIMYGQGTQVTVSS |
| 34C07 | 18 | EVQLVESGGGLVQPGGSLGLSCVASGSIFRINAMAWYRQAPGKQ |
| | | RELVAEITAGGSTNYADSVKGRFTISVDNAWNTLYLQMNSLKVE |
| | | DTAVYYCNLDHYTTWDRRSAYWGQGTQVTVSS |
| 05A09 | 19 | EVQLVESGGGLVQAGGSLRLSCAASGFTFDDYAIGWFRQAPGKE |
| | | REGVSCISSSDGSTVYADSVKGRFTISSDNAKNTVYLQMNSLKPE |
| | | DTAVYYCAAERRRGYSDLCRFYYGMDYWGKGTQVTVSS |
| 17C08 | 20 | EVQLVESGGGLMQAGDSLRLSCAASGRAFSSYALGWFRRAPGK |
| | | ERECVAATDRLGDNTYFPDSVKGRFTISRDNAKNTLYLQMNNL |
| | | KPEDTAVYYCAAGAVRYGVSTSPMNYNYWGQGTQVTVSS |
| 21B02 | 21 | EVQLVESGGGLVQPGGSLRLSCAASGFTFDYYTIGWFRQAPGKE |
| | | REGVSCISSRDGDSYYADSVKGRFTISRDNAKNTAYLQMNSLKP |
| | | EDTAVYYCAASASDYGLGLELFHDEYNYWGQGTQVTVSS |
| 21F06 | 22 | EVQLVESGGGLVQAGGSLRLSCAASGRTYYLNAMGWFRQGPG |
| | | KDREFVAAIDWSDGNKDYADSVKGRFTISRDNAKNTVYLQMNS |
| | | LKPEDTAVYYCAADTPPWGPMIYIESYDSWGQGTQVTVSS |
| 23F05 | 23 | EVQLVESGGGLVQAGGSLRLSCAASGFTFDGYAIGWFRQAPGKE |
| | | REGVSCISGGDGRSYYADSVKGRFTVSSDNAKNTLYLEMNSLKP |
| | | EDTAVYYCAVIWGPYCSDSYEYLYEYDYWGQGTQVTVSS |
| 34A04 | 24 | EVQLVESGGGLVQAGGSLRLSCAASGFTFDDYTIGWFRQAPGKE |
| | | REEISCISNNDGSTYYTNSVKGRFTISSDNAKNTVYLQMNSLKPE |
| | | DTAVYYCAASPHGCWYDLIPLQADFGSWGQGTQVTVSS |
| 17E08 | 25 | EVQLVESGGGLVQPGGSLRLSCSASGSIFGLNAMGWYRQTPGKE |
| | | RELVAGITSITRVGSTRYADSAKGRFTISGDYAKNTVYLQMNSL |
| | | KPEDTGVYYCRMSIVKSGGADYWGQGTQVTVSS |
| 04F10 | 26 | EVQLVESGGGLVQPGGSLKLSCVASGSMFRFYHMAWYRQAPGE |
| | | QRELVARIYTGGDTIYGDSVLGRFTISRDNSKNTVYLQMNTLKPE |
| | | DTGVYYCNAFREYH IWGQGTQVTVSS |

[0213] In particular, the invention in some specific aspects provides:
[0214] amino acid sequences that are directed against (as defined herein) HER3 and that have at least 80%, preferably at least 85%, such as 90% or 95% or more sequence identity with at least one of the amino acid sequences of SEQ ID NO's: 12 to 26 (see Table A-1). These amino acid sequences may further be such that they neutralize binding of the cognate ligand to HER3; and/or compete with the cognate ligand for binding to HER3; and/or are directed against the heterodimerization site (as defined herein) on HER3;
[0215] amino acid sequences that cross-block (as defined herein) the binding of at least one of the amino acid sequences of SEQ ID NO's: 12 to 26 (see Table A-1) to HER3 and/or that compete with at least one of the amino acid sequences of SEQ ID NO's: 12 to 26 (see Table A-1) for binding to HER3. Again, these amino acid sequences may further be such that they neutralize binding of the cognate ligand to HER3; and/or compete with the cognate ligand for binding to HER3; and/or are directed against the heterodimerization site (as defined herein) on HER3;
   which amino acid sequences may be as further described herein (and may for example be Nanobodies); as well as polypeptides of the invention that comprise one or more of such amino acid sequences (which may be as further described herein, and may for example be bispecific and/or biparatopic polypeptides as described herein), and nucleic acid sequences that encode such amino acid sequences and polypeptides. Such amino acid sequences and polypeptides do not include any naturally occurring ligands.

[0216] In some other specific aspects, the invention provides:
[0217] amino acid sequences of the invention that are specific for HER3 compared to HER1, HER2 and/or HER4;
   which amino acid sequences of the invention may be as further described herein (and may for example be Nanobodies); as well as polypeptides of the invention that comprise one or more of such amino acid sequences (which may be as further described herein, and may for example be bispecific and/or biparatopic polypeptides as described herein), and nucleic acid sequences that encode such amino acid sequences and polypeptides. Such amino acid sequences and polypeptides do not include any naturally occurring ligands.

[0218] Accordingly, some particularly preferred Nanobodies of the invention are Nanobodies which can bind (as further defined herein) to and/or are directed against to HER3 and which:
[0219] i) have at least 80% amino acid identity with at least one of the amino acid sequences of SEQ ID NO's: 12 to 26 (see Table A-1), in which for the purposes of determining the degree of amino acid identity, the amino acid residues that form the CDR sequences are disregarded. In this respect, reference is also made to Table B-1, which lists the framework 1 sequences (SEQ ID NO's: 42 to 56), framework 2 sequences (SEQ ID NO's: 72 to 86), framework 3 sequences (SEQ ID NO's: 102 to 116) and framework 4 sequences (SEQ ID NO's: 132 to 146) of the Nanobodies of SEQ ID NO's: 12 to 26 (see Table A-1) (with respect to the amino acid residues at positions 1 to 4 and 27 to 30 of the framework 1 sequences, reference is also made to the comments made below. Thus, for determining the degree of amino acid identity, these residues are preferably disregarded);
   and in which:
[0220] ii) preferably one or more of the amino acid residues at positions 11, 37, 44, 45, 47, 83, 84, 103, 104 and 108 according to the Kabat numbering are chosen from the Hallmark residues mentioned in Table B-2 supra.

[0221] In these Nanobodies, the CDR sequences are generally as further defined herein.

[0222] Again, such Nanobodies may be derived in any suitable manner and from any suitable source, and may for example be naturally occurring V_{HH} sequences (i.e. from a suitable species of Camelid) or synthetic or semi-synthetic amino acid sequences, including but not limited to “humanized” (as defined herein) Nanobodies, “camelized” (as defined herein) immunoglobulin sequences (and in particular camelized heavy chain variable domain sequences), as well as Nanobodies that have been obtained by techniques such as affinity maturation (for example, starting from synthetic, random or naturally occurring immunoglobulin sequences), CDR grafting, veneering, combining fragments derived from different immunoglobulin sequences, PCR assembly using overlapping primers, and similar techniques for engineering immunoglobulin sequences well known to the skilled person; or any suitable combination of any of the foregoing as further described herein. Also, when a Nanobody comprises a V_{HH} sequence, said Nanobody may be suitably humanized, as further described herein, so as to provide one or more further (partially or fully) humanized Nanobodies of the invention. Similarly, when a Nanobody comprises a synthetic or semi-synthetic sequence (such as a partially humanized sequence), said Nanobody may optionally be further suitably humanized, again as described herein, again so as to provide one or more further (partially or fully) humanized Nanobodies of the invention.

[0223] In particular, humanized Nanobodies may be amino acid sequences that are as generally defined for Nanobodies in the previous paragraphs, but in which at least one amino acid residue is present (and in particular, in at least one of the framework residues) that is and/or that corresponds to a humanizing substitution (as defined herein). Some preferred, but non-limiting humanizing substitutions (and suitable combinations thereof) will become clear to the skilled person based on the disclosure herein. In addition, or alternatively, other potentially useful humanizing substitutions can be ascertained by comparing the sequence of the framework regions of a naturally occurring V_{HH} sequence with the corresponding framework sequence of one or more closely related human V_{H} sequences, after which one or more of the potentially useful humanizing substitutions (or combinations thereof) thus determined can be introduced into said V_{HH} sequence (in any manner known per se, as further described herein) and the resulting humanized V_{HH} sequences can be tested for affinity for the target, for stability, for ease and level of expression, and/or for other desired properties. In this way, by means of a limited degree of trial and error, other suitable humanizing substitutions (or suitable combinations thereof) can be determined by the skilled person based on the disclosure herein. Also, based on the foregoing, (the framework regions of) a Nanobody may be partially humanized or fully humanized.

[0224] Some particularly preferred sequence optimized Nanobodies of the invention are sequence optimized variants of the Nanobodies of SEQ ID NO's: 12 to 26 (see Table A-1) are some especially preferred examples.

[0225] Thus, some other preferred Nanobodies of the invention are Nanobodies which can bind (as further defined herein) to HER3 and which:
[0226] i) are a humanized variant of one of the amino acid sequences of SEQ ID NO's: 12 to 26 (see Table A-1); and/or
[0227] ii) have at least 80% amino acid identity with at least one of the amino acid sequences of SEQ ID NO's: 12 to 26 (see Table A-1), in which for the purposes of determining the degree of amino acid identity, the amino acid residues that form the CDR sequences are disregarded;
   and in which:
[0228] i) preferably one or more of the amino acid residues at positions 11, 37, 44, 45, 47, 83, 84, 103, 104 and 108 according to the Kabat numbering are chosen from the Hallmark residues mentioned in Table B-2 supra.

[0229] According to another specific aspect of the invention, the invention provides a number of stretches of amino acid residues (i.e. small peptides) that are particularly suited for binding to HER3. These stretches of amino acid residues may be present in, and/or may be corporated into, an amino acid sequence of the invention, in particular in such a way that they form (part of) the antigen binding site of an amino acid sequence of the invention. As these stretches of amino acid residues were first generated as CDR sequences of heavy chain antibodies or V_{HH} sequences that were raised against HER3 (or may be based on and/or derived from such CDR sequences, as further described herein), they will also generally be referred to herein as “CDR sequences” (i.e. as CDR1 sequences, CDR2 sequences and CDR3 sequences, respectively). It should however be noted that the invention in its broadest sense is not limited to a specific structural role or function that these stretches of amino acid residues may have in an amino acid sequence of the invention, as long as these stretches of amino acid residues allow the amino acid sequence of the invention to bind to HER3. Thus, generally, the invention in its broadest sense comprises any amino acid sequence that is capable of binding to HER3 and that comprises one or more CDR sequences as described herein, and in particular a suitable combination of two or more such CDR sequences, that are suitably linked to each other via one or more further amino acid sequences, such that the entire amino acid sequence forms a binding domain and/or binding unit that is capable of binding to HER3. It should however also be noted that the presence of only one such CDR sequence in an amino acid sequence of the invention may by itself already be sufficient to provide an amino acid sequence of the invention that is capable of binding to HER3; reference is for example again made to the so-called “Expedite fragments” described in WO 03/050531 or WO2009/127691.

[0230] Thus, in another specific, but non-limiting aspect, the amino acid sequence of the invention may be an amino acid sequence that comprises at least one amino acid sequence that is chosen from the group consisting of the CDR1 sequences, CDR2 sequences and CDR3 sequences that are described herein (or any suitable combination thereof). In particular, an amino acid sequence of the invention may be an amino acid sequence that comprises at least one antigen binding site, wherein said antigen binding site comprises at least one amino acid sequence that is chosen from the group consisting of the CDR1 sequences, CDR2 sequences and CDR3 sequences that are described herein (or any suitable combination thereof).

[0231] Generally, in this aspect of the invention, the amino acid sequence of the invention may be any amino acid sequence that comprises at least one stretch of amino acid residues, in which said stretch of amino acid residues has an amino acid sequence that corresponds to the sequence of at least one of the CDR sequences described herein. Such an amino acid sequence may or may not comprise an immunoglobulin fold. For example, and without limitation, such an amino acid sequence may be a suitable fragment of an immunoglobulin sequence that comprises at least one such CDR sequence, but that is not large enough to form a (complete) immunoglobulin fold (reference is for example again made to the “Expedite fragments” described in WO 03/050531 or WO2009/127691). Alternatively, such an amino acid sequence may be a suitable “protein scaffold” that comprises least one stretch of amino acid residues that corresponds to such a CDR sequence (i.e. as part of its antigen binding site). Suitable scaffolds for presenting amino acid sequences will be clear to the skilled person, and for example comprise, without limitation, to binding scaffolds based on or derived from immunoglobulins (i.e. other than the immunoglobulin sequences already described herein), protein scaffolds derived from protein A domains (such as Affibodies™) tendamistat, fibronectin, lipocalin, CTLA-4, T-cell receptors, designed ankyrin repeats, avimers and PDZ domains (Binz et al., Nat. Biotech 2005, Vol 23:1257), and binding moieties based on DNA or RNA including but not limited to DNA or RNA aptamers (Ulrich et al., Comb Chem High Throughput Screen 2006 9(8):619-32).

[0232] Again, any amino acid sequence of the invention that comprises one or more of these CDR sequences is preferably such that it can specifically bind (as defined herein) to HER3, and more in particular such that it can bind to HER3 with an affinity (suitably measured and/or expressed as a K_{D}-value (actual or apparent), a K_{A}-value (actual or apparent), a kₒₙ-rate and/or a k_{off}-rate, or alternatively as an IC₅₀ value, as further described herein), that is as defined herein.

[0233] More in particular, the amino acid sequences according to this aspect of the invention may be any amino acid sequence that comprises at least one antigen binding site, wherein said antigen binding site comprises at least two amino acid sequences that are chosen from the group consisting of the CDR1 sequences described herein, the CDR2 sequences described herein and the CDR3 sequences described herein, such that (i) when the first amino acid sequence is chosen from the CDR1 sequences described herein, the second amino acid sequence is chosen from the CDR2 sequences described herein or the CDR3 sequences described herein; (ii) when the first amino acid sequence is chosen from the CDR2 sequences described herein, the second amino acid sequence is chosen from the CDR1 sequences described herein or the CDR3 sequences described herein; or (iii) when the first amino acid sequence is chosen from the CDR3 sequences described herein, the second amino acid sequence is chosen from the CDR1 sequences described herein or the CDR3 sequences described herein.

[0234] Even more in particular, the amino acid sequences of the invention may be amino acid sequences that comprise at least one antigen binding site, wherein said antigen binding site comprises at least three amino acid sequences that are chosen from the group consisting of the CDR1 sequences described herein, the CDR2 sequences described herein and the CDR3 sequences described herein, such that the first amino acid sequence is chosen from the CDR1 sequences described herein, the second amino acid sequence is chosen from the CDR2 sequences described herein, and the third amino acid sequence is chosen from the CDR3 sequences described herein. Preferred combinations of CDR1, CDR2 and CDR3 sequences will become clear from the further description herein. As will be clear to the skilled person, such an amino acid sequence is preferably an immunoglobulin sequence (as further described herein), but it may for example also be any other amino acid sequence that comprises a suitable scaffold for presenting said CDR sequences.

[0235] Thus, in one specific, but non-limiting aspect, the invention relates to an amino acid sequence directed against HER3, that comprises one or more stretches of amino acid residues chosen from the group consisting of:
[0236] a) the amino acid sequences of SEQ ID NO's: 57 to 71;
[0237] b) amino acid sequences that have at least 80% amino acid identity with at least one of the amino acid sequences of SEQ ID NO's: 57 to 71;
[0238] c) amino acid sequences that have 3, 2, or 1 amino acid difference with at least one of the amino acid sequences of SEQ ID NO's: 57 to 71;
[0239] d) the amino acid sequences of SEQ ID NO's: 87 to 101;
[0240] e) amino acid sequences that have at least 80% amino acid identity with at least one of the amino acid sequences of SEQ ID NO's: 87 to 101;
[0241] f) amino acid sequences that have 3, 2, or 1 amino acid difference with at least one of the amino acid sequences of SEQ ID NO's: 87 to 101;
[0242] g) the amino acid sequences of SEQ ID NO's: 117 to 131;
[0243] h) amino acid sequences that have at least 80% amino acid identity with at least one of the amino acid sequences of SEQ ID NO's: 117 to 131;
[0244] i) amino acid sequences that have 3, 2, or 1 amino acid difference with at least one of the amino acid sequences of SEQ ID NO's: 117 to 131;
   or any suitable combination thereof.

[0245] When an amino acid sequence of the invention contains one or more amino acid sequences according to b) and/or c):
[0246] i) any amino acid substitution in such an amino acid sequence according to b) and/or c) is preferably, and compared to the corresponding amino acid sequence according to a), a conservative amino acid substitution, (as defined herein);
   and/or
[0247] ii) the amino acid sequence according to b) and/or c) preferably only contains amino acid substitutions, and no amino acid deletions or insertions, compared to the corresponding amino acid sequence according to a);
   and/or
[0248] iii) the amino acid sequence according to b) and/or c) may be an amino acid sequence that is derived from an amino acid sequence according to a) by means of affinity maturation using one or more techniques of affinity maturation known per se.

[0249] Similarly, when an amino acid sequence of the invention contains one or more amino acid sequences according to e) and/or f):
[0250] i) any amino acid substitution in such an amino acid sequence according to e) and/or f) is preferably, and compared to the corresponding amino acid sequence according to d), a conservative amino acid substitution, (as defined herein);
   and/or
[0251] ii) the amino acid sequence according to e) and/or f) preferably only contains amino acid substitutions, and no amino acid deletions or insertions, compared to the corresponding amino acid sequence according to d);
   and/or
[0252] iii) the amino acid sequence according to e) and/or f) may be an amino acid sequence that is derived from an amino acid sequence according to d) by means of affinity maturation using one or more techniques of affinity maturation known per se.

[0253] Also, similarly, when an amino acid sequence of the invention contains one or more amino acid sequences according to h) and/or i):
[0254] i) any amino acid substitution in such an amino acid sequence according to h) and/or i) is preferably, and compared to the corresponding amino acid sequence according to g), a conservative amino acid substitution, (as defined herein);
   and/or
[0255] ii) the amino acid sequence according to h) and/or i) preferably only contains amino acid substitutions, and no amino acid deletions or insertions, compared to the corresponding amino acid sequence according to g);
   and/or
[0256] iii) the amino acid sequence according to h) and/or i) may be an amino acid sequence that is derived from an amino acid sequence according to g) by means of affinity maturation using one or more techniques of affinity maturation known per se.

[0257] It should be understood that the last preceding paragraphs also generally apply to any amino acid sequences of the invention that comprise one or more amino acid sequences according to b), c), e), f), h) or i), respectively.

[0258] In this specific aspect, the amino acid sequence preferably comprises one or more stretches of amino acid residues chosen from the group consisting of:
[0259] i) the amino acid sequences of SEQ ID NO's: 57 to 71;
[0260] ii) the amino acid sequences of SEQ ID NO's: 87 to 101; and
[0261] iii) the amino acid sequences of SEQ ID NO's: 117 to 131;
   or any suitable combination thereof.

[0262] Also, preferably, in such an amino acid sequence, at least one of said stretches of amino acid residues forms part of the antigen binding site for binding against HER3.

[0263] In a more specific, but again non-limiting aspect, the invention relates to an amino acid sequence directed against HER3, that comprises two or more stretches of amino acid residues chosen from the group consisting of:
[0264] a) the amino acid sequences of SEQ ID NO's: 57 to 71;
[0265] b) amino acid sequences that have at least 80% amino acid identity with at least one of the amino acid sequences of SEQ ID NO's: 57 to 71;
[0266] c) amino acid sequences that have 3, 2, or 1 amino acid difference with at least one of the amino acid sequences of SEQ ID NO's: 57 to 71;
[0267] d) the amino acid sequences of SEQ ID NO's: 87 to 101;
[0268] e) amino acid sequences that have at least 80% amino acid identity with at least one of the amino acid sequences of SEQ ID NO's: 87 to 101;
[0269] amino acid sequences that have 3, 2, or 1 amino acid difference with at least one of the amino acid sequences of SEQ ID NO's: 87 to 101;
[0270] g) the amino acid sequences of SEQ ID NO's: 117 to 131;
[0271] h) amino acid sequences that have at least 80% amino acid identity with at least one of the amino acid sequences of SEQ ID NO's: 117 to 131;
[0272] i) amino acid sequences that have 3, 2, or 1 amino acid difference with at least one of the amino acid sequences of SEQ ID NO's: 117 to 131;
   such that (i) when the first stretch of amino acid residues corresponds to one of the amino acid sequences according to a), b) or c), the second stretch of amino acid residues corresponds to one of the amino acid sequences according to d), e), f), g), h) or i); (ii) when the first stretch of amino acid residues corresponds to one of the amino acid sequences according to d), e) or f), the second stretch of amino acid residues corresponds to one of the amino acid sequences according to a), b), c), g), h) or i); or (iii) when the first stretch of amino acid residues corresponds to one of the amino acid sequences according to g), h) or i), the second stretch of amino acid residues corresponds to one of the amino acid sequences according to a), b), c), d), e) or f).

[0273] In this specific aspect, the amino acid sequence preferably comprises two or more stretches of amino acid residues chosen from the group consisting of:
[0274] i) the amino acid sequences of SEQ ID NO's: 57 to 71;
[0275] ii) the amino acid sequences of SEQ ID NO's: 87 to 101; and
[0276] iii) the amino acid sequences of SEQ ID NO's: 117 to 131;
   such that, (i) when the first stretch of amino acid residues corresponds to one of the amino acid sequences of SEQ ID NO's: 57 to 71, the second stretch of amino acid residues corresponds to one of the amino acid sequences of SEQ ID NO's: 87 to 101 or of SEQ ID NO's: 117 to 131; (ii) when the first stretch of amino acid residues corresponds to one of the amino acid sequences of SEQ ID NO's: 87 to 101, the second stretch of amino acid residues corresponds to one of the amino acid sequences of SEQ ID NO's: 57 to 71 or of SEQ ID NO's: 117 to 131; or (iii) when the first stretch of amino acid residues corresponds to one of the amino acid sequences of SEQ ID NO's: 117 to 131, the second stretch of amino acid residues corresponds to one of the amino acid sequences of SEQ ID NO's: 57 to 71 or of SEQ ID NO's: 87 to 101.

[0277] Also, in such an amino acid sequence, the at least two stretches of amino acid residues again preferably form part of the antigen binding site for binding against HER3.

[0278] In an even more specific, but non-limiting aspect, the invention relates to an amino acid sequence directed against HER3, that comprises three or more stretches of amino acid residues, in which the first stretch of amino acid residues is chosen from the group consisting of:
[0279] a) the amino acid sequences of SEQ ID NO's: 57 to 71;
[0280] b) amino acid sequences that have at least 80% amino acid identity with at least one of the amino acid sequences of SEQ ID NO's: 57 to 71;
[0281] c) amino acid sequences that have 3, 2, or 1 amino acid difference with at least one of the amino acid sequences of SEQ ID NO's: 57 to 71;
   the second stretch of amino acid residues is chosen from the group consisting of:
[0282] d) the amino acid sequences of SEQ ID NO's: 87 to 101;
[0283] e) amino acid sequences that have at least 80% amino acid identity with at least one of the amino acid sequences of SEQ ID NO's: 87 to 101;
[0284] f) amino acid sequences that have 3, 2, or 1 amino acid difference with at least one of the amino acid sequences of SEQ ID NO's: 87 to 101;
   and the third stretch of amino acid residues is chosen from the group consisting of:
[0285] g) the amino acid sequences of SEQ ID NO's: 117 to 131;
[0286] h) amino acid sequences that have at least 80% amino acid identity with at least one of the amino acid sequences of SEQ ID NO's: 117 to 131;
[0287] i) amino acid sequences that have 3, 2, or 1 amino acid difference with at least one of the amino acid sequences of SEQ ID NO's: 117 to 131.

[0288] Preferably, in this specific aspect, the first stretch of amino acid residues is chosen from the group consisting of the amino acid sequences of SEQ ID NO's: 57 to 71; the second stretch of amino acid residues is chosen from the group consisting of the amino acid sequences of SEQ ID NO's: 87 to 101; and the third stretch of amino acid residues is chosen from the group consisting of the amino acid sequences of SEQ ID NO's: 117 to 131.

[0289] Again, preferably, in such an amino acid sequence, the at least three stretches of amino acid residues forms part of the antigen binding site for binding against HER3.

[0290] Preferred combinations of such stretches of amino acid sequences will become clear from the further disclosure herein.

[0291] Preferably, in such amino acid sequences the CDR sequences have at least 70% amino acid identity, preferably at least 80% amino acid identity, more preferably at least 90% amino acid identity, such as 95% amino acid identity or more or even essentially 100% amino acid identity with the CDR sequences of at least one of the amino acid sequences of SEQ ID NO's: 12 to 26 (see Table A-1). This degree of amino acid identity can for example be determined by determining the degree of amino acid identity (in a manner described herein) between said amino acid sequence and one or more of the sequences of SEQ ID NO's: 12 to 26 (see Table A-1), in which the amino acid residues that form the framework regions are disregarded. Also, such amino acid sequences of the invention can be as further described herein.

[0292] Also, such amino acid sequences are preferably such that they can specifically bind (as defined herein) to HER3; and more in particular bind to HER3 with an affinity (suitably measured and/or expressed as a K_{D}-value (actual or apparent), a K_{A}-value (actual or apparent), a kₒₙ-rate and/or a k_{off}-rate, or alternatively as an IC₅₀ value, as further described herein) that is as defined herein.

[0293] When the amino acid sequence of the invention essentially consists of 4 framework regions (FR1 to FR4, respectively) and 3 complementarity determining regions (CDR1 to CDR3, respectively), the amino acid sequence of the invention is preferably such that:

[0294] CDR1 is chosen from the group consisting of:
[0295] a) the amino acid sequences of SEQ ID NO's: 57 to 71;
[0296] b) amino acid sequences that have at least 80% amino acid identity with at least one of the amino acid sequences of SEQ ID NO's: 57 to 71;
[0297] c) amino acid sequences that have 3, 2, or 1 amino acid difference with at least one of the amino acid sequences of SEQ ID NO's: 57 to 71;
   and/or

[0298] CDR2 is chosen from the group consisting of:
[0299] d) the amino acid sequences of SEQ ID NO's: 87 to 101;
[0300] e) amino acid sequences that have at least 80% amino acid identity with at least one of the amino acid sequences of SEQ ID NO's: 87 to 101;
[0301] f) amino acid sequences that have 3, 2, or 1 amino acid difference with at least one of the amino acid sequences of SEQ ID NO's: 87 to 101;
   and/or

[0302] CDR3 is chosen from the group consisting of:
[0303] g) the amino acid sequences of SEQ ID NO's: 117 to 131;
[0304] h) amino acid sequences that have at least 80% amino acid identity with at least one of the amino acid sequences of SEQ ID NO's: 117 to 131;
[0305] i) amino acid sequences that have 3, 2, or 1 amino acid difference with at least one of the amino acid sequences of SEQ ID NO's: 117 to 131.

[0306] In particular, such an amino acid sequence of the invention may be such that CDR1 is chosen from the group consisting of the amino acid sequences of SEQ ID NO's: 57 to 71; and/or CDR2 is chosen from the group consisting of the amino acid sequences of SEQ ID NO's: 87 to 101; and/or CDR3 is chosen from the group consisting of the amino acid sequences of SEQ ID NO's: 117 to 131.

[0307] In particular, when the amino acid sequence of the invention essentially consists of 4 framework regions (FR1 to FR4, respectively) and 3 complementarity determining regions (CDR1 to CDR3, respectively), the amino acid sequence of the invention is preferably such that:

[0308] CDR1 is chosen from the group consisting of:
[0309] a) the amino acid sequences of SEQ ID NO's: 57 to 71;
[0310] b) amino acid sequences that have at least 80% amino acid identity with at least one of the amino acid sequences of SEQ ID NO's: 57 to 71;
[0311] c) amino acid sequences that have 3, 2, or 1 amino acid difference with at least one of the amino acid sequences of SEQ ID NO's: 57 to 71;
   and

[0312] CDR2 is chosen from the group consisting of:
[0313] d) the amino acid sequences of SEQ ID NO's: 87 to 101;
[0314] e) amino acid sequences that have at least 80% amino acid identity with at least one of the amino acid sequences of SEQ ID NO's: 87 to 101;
[0315] f) amino acid sequences that have 3, 2, or 1 amino acid difference with at least one of the amino acid sequences of SEQ ID NO's: 87 to 101;
   and

[0316] CDR3 is chosen from the group consisting of:
[0317] g) the amino acid sequences of SEQ ID NO's: 117 to 131;
[0318] h) amino acid sequences that have at least 80% amino acid identity with at least one of the amino acid sequences of SEQ ID NO's: 117 to 131;
[0319] i) amino acid sequences that have 3, 2, or 1 amino acid difference with at least one of the amino acid sequences of SEQ ID NO's: 117 to 131; or any suitable fragment of such an amino acid sequence

[0320] In particular, such an amino acid sequence of the invention may be such that CDR1 is chosen from the group consisting of the amino acid sequences of SEQ ID NO's: 57 to 71; and CDR2 is chosen from the group consisting of the amino acid sequences of SEQ ID NO's: 87 to 101; and CDR3 is chosen from the group consisting of the amino acid sequences of SEQ ID NO's: 117 to 131.

[0321] Again, preferred combinations of CDR sequences will become clear from the further description herein.

[0322] Also, such amino acid sequences are preferably such that they can specifically bind (as defined herein) to HER3; and more in particular bind to HER3 with an affinity (suitably measured and/or expressed as a K_{D}-value (actual or apparent), a K_{A}-value (actual or apparent), a kₒₙ-rate and/or a k_{off}-rate, or alternatively as an IC₅₀ value, as further described herein) that is as defined herein.

[0323] In one preferred, but non-limiting aspect, the invention relates to an amino acid sequence that essentially consists of 4 framework regions (FR1 to FR4, respectively) and 3 complementarity determining regions (CDR1 to CDR3, respectively), in which the CDR sequences of said amino acid sequence have at least 70% amino acid identity, preferably at least 80% amino acid identity, more preferably at least 90% amino acid identity, such as 95% amino acid identity or more or even essentially 100% amino acid identity with the CDR sequences of at least one of the amino acid sequences of SEQ ID NO's: 12 to 26 (see Table A-1). This degree of amino acid identity can for example be determined by determining the degree of amino acid identity (in a manner described herein) between said amino acid sequence and one or more of the sequences of SEQ ID NO's: 12 to 26 (see Table A-1), in which the amino acid residues that form the framework regions are disregarded. Such amino acid sequences of the invention can be as further described herein.

[0324] In such an amino acid sequence of the invention, the framework sequences may be any suitable framework sequences, and examples of suitable framework sequences will be clear to the skilled person, for example on the basis the standard handbooks and the further disclosure and prior art mentioned herein.

[0325] The framework sequences are preferably (a suitable combination of) immunoglobulin framework sequences or framework sequences that have been derived from immunoglobulin framework sequences (for example, by humanization or camelization). For example, the framework sequences may be framework sequences derived from a light chain variable domain (e.g. a V_{L}-sequence) and/or from a heavy chain variable domain (e.g. a V_{H}-sequence). In one particularly preferred aspect, the framework sequences are either framework sequences that have been derived from a V_{HH}-sequence (in which said framework sequences may optionally have been partially or fully humanized) or are conventional V_{H} sequences that have been camelized (as defined herein).

[0326] The framework sequences are preferably such that the amino acid sequence of the invention is a domain antibody (or an amino acid sequence that is suitable for use as a domain antibody); is a single domain antibody (or an amino acid sequence that is suitable for use as a single domain antibody); is a “dAb” (or an amino acid sequence that is suitable for use as a dAb); or is a Nanobody (including but not limited to V_{HH} sequence). Again, suitable framework sequences will be clear to the skilled person, for example on the basis the standard handbooks and the further disclosure and prior art mentioned herein.

[0327] In particular, the framework sequences present in the amino acid sequences of the invention may contain one or more of Hallmark residues (as defined herein), such that the amino acid sequence of the invention is a Nanobody. Some preferred, but non-limiting examples of (suitable combinations of) such framework sequences will become clear from the further disclosure herein.

[0328] In particular, when the ISV's of the invention are nNnobodies (as described herein) the framework sequences present therein may be as generally described on pages 258 to 297 of WO 09/068,627 (incorporated herein by reference). For example, they may contain one or more of the combinations of Hallmark residues set out in Table A-5 of WO 09/068,627; and FR1, FR2, FR3 and FR4 may contain the amino acid residues set out in Table A-6, Table A-7, Table A-8 and Table A-9 of WO 09/068,627, respectively. Also, when the ISV's of the invention are Nanobodies, they may belong to the KERE-group (see pages 281 to 284 of WO 09/068,627, with some representative FR1, FR2, FR3 and FR4 sequences for this group given in Tables A-11/A-15, A-12, A-13 and A-14 of WO 09/068,627); to the GLEW-group (see pages 285 to 287 of WO 09/068,627, with some representative FR1, FR2, FR3 and FR4 sequences for this group given in Tables A-16/A-20, A-17, A-18 and A-19 of WO 09/068,627); or to the P, R, S 103 group (see pages 287 to 291 of WO 09/068,627, with some representative FR1, FR2, FR3 and FR4 sequences for this group given in Tables A-21/A-25, A-22, A-23 and A-24 of WO 09/068,627), which are all as described in WO 09/068,627, with some representative sequences for each of these groups given in Table A-10 of 09/068627. As also described in WO 09/068,627, these framework sequences may contain one or more suitable humanizing substitutions or (other) substitutions for optimizing the sequence (see also the further disclosure herein).

[0329] Again, some particularly preferred but non-limiting FR1, FR2, FR3 and FR4 sequences (and combinations thereof) are those described in Table B-1, or suitable variants of such FR1, FR2, FR3 and FR4 sequences, respectively (for example, with less than 6, such as 1, 2, 3, 4 or 5 suitable amino acid differences in such an FR1, FR2, FR3 or FR4 compared to a framework sequence mentioned in Table B-1, in which the amino acid differences may be as described in WO 09/068,627) that still essentially retain the desired properties of Nanobodies.

[0330] Again, as generally described herein for the amino acid sequences of the invention, it is also possible to use suitable fragments (or combinations of fragments) of any of the foregoing, such as fragments that contain one or more CDR sequences, suitably flanked by and/or linked via one or more framework sequences (for example, in the same order as these CDR's and framework sequences may occur in the full-sized immunoglobulin sequence from which the fragment has been derived). Such fragments may also again be such that they comprise or can form an immunoglobulin fold, or alternatively be such that they do not comprise or cannot form an immunoglobulin fold.

[0331] In one specific aspect, such a fragment comprises a single CDR sequence as described herein (and in particular a CDR3 sequence), that is flanked on each side by (part of) a framework sequence (and in particular, part of the framework sequence(s) that, in the immunoglobulin sequence from which the fragment is derived, are adjacent to said CDR sequence. For example, a CDR3 sequence may be preceded by (part of) a FR3 sequence and followed by (part of) a FR4 sequence). Such a fragment may also contain a disulphide bridge, and in particular a disulphide bridge that links the two framework regions that precede and follow the CDR sequence, respectively (for the purpose of forming such a disulphide bridge, cysteine residues that naturally occur in said framework regions may be used, or alternatively cysteine residues may be synthetically added to or introduced into said framework regions).

[0332] In another aspect, the invention relates to a compound or construct, and in particular a protein or polypeptide (also referred to herein as a “compound of the invention” or “polypeptide of the invention”, respectively) that comprises or essentially consists of one or more amino acid sequences of the invention (or suitable fragments thereof), and optionally further comprises one or more other groups, residues, moieties or binding units. As will become clear to the skilled person from the further disclosure herein, such further groups, residues, moieties, binding units or amino acid sequences may or may not provide further functionality to the amino acid sequence of the invention (and/or to the compound or construct in which it is present) and may or may not modify the properties of the amino acid sequence of the invention.

[0333] For example, such further groups, residues, moieties or binding units may be one or more additional amino acid sequences, such that the compound or construct is a (fusion) protein or (fusion) polypeptide. In a preferred but non-limiting aspect, said one or more other groups, residues, moieties or binding units are immunoglobulin sequences, and in particular ISV's. Even more preferably, said one or more other groups, residues, moieties or binding units are chosen from the group consisting of domain antibodies, amino acid sequences that are suitable for use as a domain antibody, single domain antibodies, amino acid sequences that are suitable for use as a single domain antibody, “dAb”'s, amino acid sequences that are suitable for use as a dAb, or Nanobodies.

[0334] For example, such one or more (such as one or two) further ISV that are present in a polypeptide of the invention (i.e. in addition to the one or more ISV's against HER3) may be directed against another target than HER3 so as to provide a “bispecific” protein or polypeptide of the invention (i.e. a polypeptide of the invention that contains at least one—such as one or two—immunoglobulin single variable domain that is directed against HER3 and at least one—such as one or two—immunoglobulin single variable domain that is directed against another target).

[0335] For example, according to a specific but non-limiting aspect, the amino acid sequences, constructs, proteins or polypeptides of the invention may have been provided with an increased half-life (as defined herein, and compared with the same construct but without the modifications made to provide for the increased half-life, for example without the functionalisation/pegylation or without the serum-albumin binding peptide or binding domain/ISV), for example by suitable functionalisation (such as pegylation) and/or by including in the construct a moiety or binding unit that increases the half-life of the construct. Examples of such functionalisation, moieties or binding units will be clear to the skilled person and may for example include pegylation, fusion to serum albumin, or fusion to a peptide or binding unit that can bind to a serum protein such as serum albumin.

[0336] In the latter constructs (i.e. fusion constructs comprising at least one—such as one or two—amino acid sequence of the invention and at least one—such as one or two—peptide or binding unit that can bind to a serum protein such as serum albumin), the serum-albumin binding peptide or binding domain may be any suitable serum-albumin binding peptide or binding domain capable of increasing the half-life of the construct (compared to the same construct without the serum-albumin binding peptide or binding domain), and may in particular be serum albumin binding peptides as described in WO 2008/068280 by applicant (and in particular WO 2009/127691 and the non-prepublished U.S. application 61/301,819, both by applicant), or a serum—albumin binding immunoglobulin single variable domain (such as a serum-albumin binding Nanobody; for example Alb-1 or a humanized version of Alb-1 such as Alb-8 (also referred to herein as Alb-11 or ALB11), for which reference is for example made to WO 06/122787).

[0337] With respect to half-life, it should be noted that in the invention, and by using the various half-life extending techniques described herein (for example, by suitably choosing a serum-albumin binding peptide according to WO 2008/068280, WO 2009/127691 and/or the non-prepublished U.S. application 61/301,819), the half-life of a construct or polypeptide of the invention can (and preferably is) suitably “tailored” for the intended (therapeutic and/or diagnostic) application and/or to obtain the best balance between the desired therapeutic and/or pharmacological effect and possible undesired side-effects.

[0338] Thus, for example, and without limitation, a preferred aspect of the invention provides a “bispecific” polypeptide consisting essentially of one immunoglobulin single variable domain directed against human HER3 (or, alternatively, of two immunoglobulin single variable domains directed against human HER3, which may be the same or different, i.e. so as to provide—when they are the same or different—a “bivalent” polypeptide of the invention, or—when they are different—“biparatopic” polypeptide of the invention) and one immunoglobulin single variable domain directed against human serum albumin linked by a peptide linker (as defined herein), so as to provide a bispecific polypeptide of the invention, respectively, all as described herein. Such a protein or polypeptide may also be in essentially isolated form (as defined herein).

[0339] In another specific, but non-limiting aspect, an amino acid sequence (such as a Nanobody) of the invention or a polypeptide of the invention (such as a bivalent, biparatopic or bispecific polypeptide of the invention) may be suitably linked (again, chemically or via one or more suitable linkers or spacers) to a toxin or to a (cyto)toxic residue, moiety or payload. Examples of suitable (cyto)toxic moieties, compounds, payloads or residues which can be linked to amino acids sequences or polypeptides of the invention to provide—for example—a cytotoxic compound (i.e. an antibody-drug conjugate or “ADC” based upon an amino acid sequence or polypeptide of the invention) will be clear to the skilled person. Reference is for example made to the review by Ducry and Stump, Bioconjugate Chem., 2010, 21 (1), pp 5-13. Such cytotoxic amino acid sequences or polypeptides of the invention may in particular be useful/suitable for those applications in which it is intended to kill a cell that expresses the target against which the amino acid sequences or polypeptides of the invention are directed (e.g. in the treatment of cancer), or to reduce or slow the growth and/or proliferation such a cell. Usually, but without limitation, (cyto)toxic polypeptides of the invention will either not be half-life extended or will have only a limited and/or tightly controlled half-life extension.

[0340] Alternatively, such one or more further groups, residues, moieties or binding units that may be present in a polypeptide of the invention may for example be chemical groups, residues, moieties, which may or may not by themselves be biologically and/or pharmacologically active. For example, and without limitation, such groups may be linked to the one or more amino acid sequences of the invention so as to provide a “derivative” of an amino acid sequence or polypeptide of the invention, as further described herein.

[0341] Also within the scope of the present invention are compounds or constructs, that comprises or essentially consists of one or more derivatives as described herein, and optionally further comprises one or more other groups, residues, moieties or binding units, optionally linked via one or more linkers. Preferably, said one or more other groups, residues, moieties or binding units are amino acid sequences.

[0342] In the compounds or constructs described above, the one or more amino acid sequences of the invention and the one or more groups, residues, moieties or binding units may be linked directly to each other and/or via one or more suitable linkers or spacers. For example, when the one or more groups, residues, moieties or binding units are amino acid sequences, the linkers may also be amino acid sequences, so that the resulting compound or construct is a fusion (protein) or fusion (polypeptide).

[0343] As will be clear from the further description above and herein, this means that the amino acid sequences of the invention can be used as “building blocks” to form polypeptides of the invention, i.e. by suitably combining them with other groups, residues, moieties or binding units, in order to form compounds or constructs as described herein (such as, without limitations, the biparatopic, bi/multivalent and bi/multispecific polypeptides of the invention described herein) which combine within one molecule one or more desired properties or biological functions.

[0344] Some specific examples of polypeptides of the invention are polypeptides that comprise or essentially consist of:
[0345] two amino acid sequences (and in particular and preferably ISV's) directed against HER3, which may be the same or different, suitably linked either directly or using one or more suitable linkers or spacers (as described herein);
[0346] two HRG-blocking amino acid sequences (as defined herein, and which may be different but which are preferably the same), and in particular and preferably two HRG-blocking ISV's (as defined herein, which again may be different but which are preferably the same), suitably linked either directly or using one or more suitable linkers or spacers (as described herein);
[0347] two dimerisation-blocking amino acid sequences (as defined herein, and which may be different but which are preferably the same), and in particular and preferably two dimerisation-blocking ISV's (as defined herein, which again may be different but which are preferably the same), suitably linked either directly or using one or more suitable linkers or spacers (as described herein);
[0348] two domain II-binding amino acid sequences (as defined herein, and which may be different but which are preferably the same), and in particular and preferably two domain II-binding ISV's (as defined herein, which again may be different but which are preferably the same), suitably linked either directly or using one or more suitable linkers or spacers (as described herein);
[0349] one HRG-blocking amino acid sequence (as defined herein, and in particular and preferably one HRG-blocking ISV, also as defined herein) and one other amino acid sequence (and in particular and preferably one other ISV) that is directed against HER3 (as defined herein) and that is not a HRG-blocking amino acid sequence (or ISV), suitably linked either directly or using one or more suitable linkers or spacers (as described herein);
[0350] one dimerisation-blocking amino acid sequence (as defined herein, and in particular and preferably one dimerisation-blocking ISV, also as defined herein) and one other amino acid sequence (and in particular and preferably one other ISV) that is directed against HER3 (as defined herein) and that is not a dimerisation-blocking amino acid sequence (or ISV), suitably linked either directly or using one or more suitable linkers or spacers (as described herein);
[0351] one domain II-binding amino acid sequence (as defined herein, and in particular and preferably one domain II-binding ISV, also as defined herein) and one other amino acid sequence (and in particular and preferably one other ISV) that is directed against HER3 (as defined herein) and that is not a domain II-binding amino acid sequence (or ISV), suitably linked either directly or using one or more suitable linkers or spacers (as described herein);
[0352] one HRG-blocking amino acid sequence (as defined herein, and in particular and preferably one HRG-blocking ISV, also as defined herein) and one dimerisation-blocking amino acid sequence (as defined herein, and in particular and preferably one dimerisation-blocking ISV, also as defined herein), suitably linked either directly or using one or more suitable linkers or spacers (as described herein);
[0353] one HRG-blocking amino acid sequence (as defined herein, and in particular and preferably one HRG-blocking ISV, also as defined herein) and one domain II-binding amino acid sequence (as defined herein, and in particular and preferably one domain II-binding ISV, also as defined herein), suitably linked either directly or using one or more suitable linkers or spacers (as described herein);
[0354] one dimerisation-blocking amino acid sequence (as defined herein, and in particular and preferably one dimerisation-blocking ISV, also as defined herein) and one domain II-binding amino acid sequence (as defined herein, and in particular and preferably one domain II-binding ISV, also as defined herein), suitably linked either directly or using one or more suitable linkers or spacers (as described herein);
   and such polypeptides (of which some non-limiting examples will be clear to the skilled person based on the disclosure herein) form further aspects of the invention.

[0355] Also, as mentioned the amino acid sequences and polypeptides of the invention (such as the polypeptides described above) may be half-life extended, for example by suitable functionalisation and/or by including in the construct a moiety or binding unit that increases the half-life of the construct. Where the half-life of an amino acid sequence or polypeptide is extended by fusion to a peptide or binding unit that can bind to a serum protein such as serum albumin, the resulting construct/polypeptide of the invention may for example and without limitation comprise or essentially consist of:
[0356] one amino acid sequence (and in particular and preferably ISV) directed against HER3 and a group, residue, moiety or binding unit that increases the half-life of said amino acid sequence (and preferably an ISV that is directed to a serum protein and in particular to serum albumin, or a peptide that is directed to a serum protein and in particular to serum albumin), suitably linked either directly or using one or more suitable linkers or spacers (as described herein);
[0357] one HRG-blocking amino acid sequence (as defined herein), and in particular and preferably one HRG-blocking ISV (as defined herein), and a group, residue, moiety or binding unit that increases the half-life of said amino acid sequence (and preferably an ISV that is directed to a serum protein and in particular to serum albumin, or a peptide that is directed to a serum protein and in particular to serum albumin), suitably linked either directly or using one or more suitable linkers or spacers (as described herein);
[0358] one dimerisation-blocking amino acid sequence (as defined herein), and in particular and preferably one dimerisation-blocking ISV (as defined herein), and a group, residue, moiety or binding unit that increases the half-life of said amino acid sequence (and preferably an ISV that is directed to a serum protein and in particular to serum albumin, or a peptide that is directed to a serum protein and in particular to serum albumin), suitably linked either directly or using one or more suitable linkers or spacers (as described herein);
[0359] one domain II-binding amino acid sequence (as defined herein), and in particular and preferably one domain II-binding ISV (as defined herein), and a group, residue, moiety or binding unit that increases the half-life of said amino acid sequence (and preferably an ISV that is directed to a serum protein and in particular to serum albumin, or a peptide that is directed to a serum protein and in particular to serum albumin), suitably linked either directly or using one or more suitable linkers or spacers (as described herein);
[0360] two amino acid sequences (and in particular and preferably ISV's) directed against HER3, which may be the same or different, and a group, residue, moiety or binding unit that increases the half-life of said amino acid sequence (and preferably an ISV that is directed to a serum protein and in particular to serum albumin, or a peptide that is directed to a serum protein and in particular to serum albumin), suitably linked either directly or using one or more suitable linkers or spacers (as described herein);
[0361] two HRG-blocking amino acid sequences (as defined herein, and which may be different but which are preferably the same), and in particular and preferably two HRG-blocking ISV's (as defined herein, which again may be different but which are preferably the same), and a group, residue, moiety or binding unit that increases the half-life of said amino acid sequence (and preferably an ISV that is directed to a serum protein and in particular to serum albumin, or a peptide that is directed to a serum protein and in particular to serum albumin), suitably linked either directly or using one or more suitable linkers or spacers (as described herein);
[0362] two dimerisation-blocking amino acid sequences (as defined herein, and which may be different but which are preferably the same), and in particular and preferably two dimerisation-blocking ISV's (as defined herein, which again may be different but which are preferably the same), and a group, residue, moiety or binding unit that increases the half-life of said amino acid sequence (and preferably an ISV that is directed to a serum protein and in particular to serum albumin, or a peptide that is directed to a serum protein and in particular to serum albumin), suitably linked either directly or using one or more suitable linkers or spacers (as described herein);
[0363] two domain II-binding amino acid sequences (as defined herein, and which may be different but which are preferably the same), and in particular and preferably two domain II-binding ISV's (as defined herein, which again may be different but which are preferably the same), and a group, residue, moiety or binding unit that increases the half-life of said amino acid sequence (and preferably an ISV that is directed to a serum protein and in particular to serum albumin, or a peptide that is directed to a serum protein and in particular to serum albumin), suitably linked either directly or using one or more suitable linkers or spacers (as described herein);
[0364] one HRG-blocking amino acid sequence (as defined herein, and in particular and preferably one HRG-blocking ISV, also as defined herein) and one other amino acid sequence (and in particular and preferably one other ISV) that is directed against HER3 (as defined herein) and that is not a HRG-blocking amino acid sequence (or ISV), and a group, residue, moiety or binding unit that increases the half-life of said amino acid sequence (and preferably an ISV that is directed to a serum protein and in particular to serum albumin, or a peptide that is directed to a serum protein and in particular to serum albumin), suitably linked either directly or using one or more suitable linkers or spacers (as described herein);
[0365] one dimerisation-blocking amino acid sequence (as defined herein, and in particular and preferably one dimerisation-blocking ISV, also as defined herein) and one other amino acid sequence (and in particular and preferably one other ISV) that is directed against HER3 (as defined herein) and that is not a dimerisation-blocking amino acid sequence (or ISV), and a group, residue, moiety or binding unit that increases the half-life of said amino acid sequence (and preferably an ISV that is directed to a serum protein and in particular to serum albumin, or a peptide that is directed to a serum protein and in particular to serum albumin), suitably linked either directly or using one or more suitable linkers or spacers (as described herein);
[0366] one domain II-binding amino acid sequence (as defined herein, and in particular and preferably one domain II-binding ISV, also as defined herein) and one other amino acid sequence (and in particular and preferably one other ISV) that is directed against HER3 (as defined herein) and that is not a domain II-binding amino acid sequence (or ISV), and a group, residue, moiety or binding unit that increases the half-life of said amino acid sequence (and preferably an ISV that is directed to a serum protein and in particular to serum albumin, or a peptide that is directed to a serum protein and in particular to serum albumin), suitably linked either directly or using one or more suitable linkers or spacers (as described herein);
[0367] one HRG-blocking amino acid sequence (as defined herein, and in particular and preferably one HRG-blocking ISV, also as defined herein) and one dimerisation-blocking amino acid sequence (as defined herein, and in particular and preferably one dimerisation-blocking ISV, also as defined herein), and a group, residue, moiety or binding unit that increases the half-life of said amino acid sequence (and preferably an ISV that is directed to a serum protein and in particular to serum albumin, or a peptide that is directed to a serum protein and in particular to serum albumin), suitably linked either directly or using one or more suitable linkers or spacers (as described herein);
[0368] one HRG-blocking amino acid sequence (as defined herein, and in particular and preferably one HRG-blocking ISV, also as defined herein) and one domain II-binding amino acid sequence (as defined herein, and in particular and preferably one domain II-binding ISV, also as defined herein), and a group, residue, moiety or binding unit that increases the half-life of said amino acid sequence (and preferably an ISV that is directed to a serum protein and in particular to serum albumin, or a peptide that is directed to a serum protein and in particular to serum albumin), suitably linked either directly or using one or more suitable linkers or spacers (as described herein);
[0369] one dimerisation-blocking amino acid sequence (as defined herein, and in particular and preferably one dimerisation-blocking ISV, also as defined herein) and one domain II-binding amino acid sequence (as defined herein, and in particular and preferably one domain II-binding ISV, also as defined herein), and a group, residue, moiety or binding unit that increases the half-life of said amino acid sequence (and preferably an ISV that is directed to a serum protein and in particular to serum albumin, or a peptide that is directed to a serum protein and in particular to serum albumin), suitably linked either directly or using one or more suitable linkers or spacers (as described herein); and such polypeptides (of which some non-limiting examples will be clear to the skilled person based on the disclosure herein—for example, some are listed in Table A-2 below) also form further aspects of the invention.

[0370] Of these, particularly preferred are polypeptides of the invention that either:
[0371] a) comprise or essentially consist of one HRG-blocking amino acid sequence (as defined herein, and in particular and preferably one HRG-blocking ISV, also as defined herein) and one dimerisation-blocking amino acid sequence (as defined herein, and in particular and preferably one dimerisation-blocking ISV, also as defined herein), and that optionally further comprise a group, residue, moiety or binding unit that increases the half-life of said amino acid sequence (and preferably an ISV that is directed to a serum protein and in particular to serum albumin such as Alb-8/Alb-11, or a peptide that is directed to a serum protein and in particular to serum albumin), suitably linked either directly or using one or more suitable linkers or spacers (as described herein). Such polypeptides may, for example and without limitation, comprise one 17B05-like sequence, one 21F06-like sequence, and a serum albumin binding ISV such as Alb-8, optionally suitably linked to each other via one or more suitable spacers or linkers. A specific preferred but non-limiting example of such polypeptide is HER3MS00135 (SEQ ID NO:282); or that
[0372] b) comprise or essentially consist of one dimerisation-blocking amino acid sequence (as defined herein, and in particular and preferably one dimerisation-blocking ISV, also as defined herein) and one domain II-binding amino acid sequence (as defined herein, and in particular and preferably one domain II-binding ISV, also as defined herein), and a group, residue, moiety or binding unit that increases the half-life of said amino acid sequence (and preferably an ISV that is directed to a serum protein and in particular to serum albumin such as Alb-8/Alb-11, or a peptide that is directed to a serum protein and in particular to serum albumin), suitably linked either directly or using one or more suitable linkers or spacers (as described herein). Such polypeptides may, for example and without limitation, comprise one 17B05-like sequence, one 18G11-like sequence, and a serum albumin binding ISV such as Alb-8, optionally suitably linked to each other via one or more suitable spacers or linkers. Two specific preferred, but non-limiting examples of such a polypeptide are HER3MS00212 (SEQ ID NO:319) and HER3MS00215 (SEQ ID NO:322).

[0373] As also already mentioned herein, when one of the above polypeptides: (i) contains an HRG-blocking amino acid sequence, it is preferably either a 21F06-like sequence (as defined herein) or a 04C07-like sequence (also as defined herein); and/or (ii) contains a dimerisation-blocking sequence, it is preferably a 17B05-like sequence (as defined herein); and/or (iii) contains a domain II-binding sequence, it is preferably either a 18G11-like sequence or a 34C07-like sequence. Some specific examples of such polypeptides of the invention are polypeptides that comprise or essentially consist of:
[0374] two 21F06-like sequences (as defined herein, and which may be the same or different), suitably linked either directly or using one or more suitable linkers or spacers (as described herein);
[0375] two 04C07-like sequences (as defined herein, and which may be the same or different), suitably linked either directly or using one or more suitable linkers or spacers (as described herein);
[0376] two 17B05-like sequences (as defined herein, and which may be the same or different), suitably linked either directly or using one or more suitable linkers or spacers (as described herein);
[0377] two 18G11-like sequences (as defined herein, and which may be the same or different), suitably linked either directly or using one or more suitable linkers or spacers (as described herein);
[0378] two 34C07-like sequences (as defined herein, and which may be the same or different), suitably linked either directly or using one or more suitable linkers or spacers (as described herein);
[0379] one 21F06-like sequence (as defined herein) and one 04C07-like sequence (as defined herein), suitably linked either directly or using one or more suitable linkers or spacers (as described herein);
[0380] one 21F06-like sequence (as defined herein) and one 17B05-like sequence (as defined herein), suitably linked either directly or using one or more suitable linkers or spacers (as described herein);
[0381] one 21F06-like sequence (as defined herein) and one 18G11-like sequence (as defined herein), suitably linked either directly or using one or more suitable linkers or spacers (as described herein);
[0382] one 21F06-like sequence (as defined herein) and one 34C07-like sequence (as defined herein), suitably linked either directly or using one or more suitable linkers or spacers (as described herein);
[0383] one 04C07-like sequence (as defined herein) and one 17B05-like sequence (as defined herein), suitably linked either directly or using one or more suitable linkers or spacers (as described herein);
[0384] one 04C07-like sequence (as defined herein) and one 18G11-like sequence (as defined herein), suitably linked either directly or using one or more suitable linkers or spacers (as described herein);
[0385] one 04C07-like sequence (as defined herein) and one 34C07-like sequence (as defined herein), suitably linked either directly or using one or more suitable linkers or spacers (as described herein);
[0386] one 17B05-like sequence (as defined herein) and one 18G11-like sequence (as defined herein), suitably linked either directly or using one or more suitable linkers or spacers (as described herein);
[0387] one 17B05-like sequence (as defined herein) and one 34C07-like sequence (as defined herein), suitably linked either directly or using one or more suitable linkers or spacers (as described herein);
[0388] one 18G11-like sequence (as defined herein) and one 34C07-like sequence (as defined herein), suitably linked either directly or using one or more suitable linkers or spacers (as described herein);
   and such polypeptides (of which some non-limiting examples will be clear to the skilled person based on the disclosure herein—for example, some are listed in Table A-2 below) again form further aspects of the invention.

[0389] Also, again, such polypeptides may be half-life extended, i.e. for example by suitable functionalisation and/or by including in the construct a moiety or binding unit that increases the half-life of the construct. Where the half-life of an amino acid sequence or polypeptide is extended by fusion to a peptide or binding unit that can bind to a serum protein such as serum albumin, the resulting construct/polypeptide of the invention may for example and without limitation comprise or essentially consist of:
[0390] two 21F06-like sequences (as defined herein, and which may be the same or different), suitably linked either directly or using one or more suitable linkers or spacers (as described herein);
[0391] two 04C07-like sequences (as defined herein, and which may be the same or different), and a group, residue, moiety or binding unit that increases the half-life of said amino acid sequence (and preferably an ISV that is directed to a serum protein and in particular to serum albumin, or a peptide that is directed to a serum protein and in particular to serum albumin), suitably linked either directly or using one or more suitable linkers or spacers (as described herein);
[0392] two 17B05-like sequences (as defined herein, and which may be the same or different), and a group, residue, moiety or binding unit that increases the half-life of said amino acid sequence (and preferably an ISV that is directed to a serum protein and in particular to serum albumin, or a peptide that is directed to a serum protein and in particular to serum albumin), suitably linked either directly or using one or more suitable linkers or spacers (as described herein);
[0393] two 18G11-like sequences (as defined herein, and which may be the same or different), and a group, residue, moiety or binding unit that increases the half-life of said amino acid sequence (and preferably an ISV that is directed to a serum protein and in particular to serum albumin, or a peptide that is directed to a serum protein and in particular to serum albumin), suitably linked either directly or using one or more suitable linkers or spacers (as described herein);
[0394] two 34C07-like sequences (as defined herein, and which may be the same or different), and a group, residue, moiety or binding unit that increases the half-life of said amino acid sequence (and preferably an ISV that is directed to a serum protein and in particular to serum albumin, or a peptide that is directed to a serum protein and in particular to serum albumin), suitably linked either directly or using one or more suitable linkers or spacers (as described herein);
[0395] one 21F06-like sequence (as defined herein) and one 04C07-like sequence (as defined herein), and a group, residue, moiety or binding unit that increases the half-life of said amino acid sequence (and preferably an ISV that is directed to a serum protein and in particular to serum albumin, or a peptide that is directed to a serum protein and in particular to serum albumin), suitably linked either directly or using one or more suitable linkers or spacers (as described herein);
[0396] one 21F06-like sequence (as defined herein) and one 17B05-like sequence (as defined herein), and a group, residue, moiety or binding unit that increases the half-life of said amino acid sequence (and preferably an ISV that is directed to a serum protein and in particular to serum albumin, or a peptide that is directed to a serum protein and in particular to serum albumin), suitably linked either directly or using one or more suitable linkers or spacers (as described herein);
[0397] one 21F06-like sequence (as defined herein) and one 18G11-like sequence (as defined herein), and a group, residue, moiety or binding unit that increases the half-life of said amino acid sequence (and preferably an ISV that is directed to a serum protein and in particular to serum albumin, or a peptide that is directed to a serum protein and in particular to serum albumin), suitably linked either directly or using one or more suitable linkers or spacers (as described herein);
[0398] one 21F06-like sequence (as defined herein) and one 34C07-like sequence (as defined herein), and a group, residue, moiety or binding unit that increases the half-life of said amino acid sequence (and preferably an ISV that is directed to a serum protein and in particular to serum albumin, or a peptide that is directed to a serum protein and in particular to serum albumin), suitably linked either directly or using one or more suitable linkers or spacers (as described herein);
[0399] one 04C07-like sequence (as defined herein) and one 17B05-like sequence (as defined herein), and a group, residue, moiety or binding unit that increases the half-life of said amino acid sequence (and preferably an ISV that is directed to a serum protein and in particular to serum albumin, or a peptide that is directed to a serum protein and in particular to serum albumin), suitably linked either directly or using one or more suitable linkers or spacers (as described herein);
[0400] one 04C07-like sequence (as defined herein) and one 18G11-like sequence (as defined herein), and a group, residue, moiety or binding unit that increases the half-life of said amino acid sequence (and preferably an ISV that is directed to a serum protein and in particular to serum albumin, or a peptide that is directed to a serum protein and in particular to serum albumin), suitably linked either directly or using one or more suitable linkers or spacers (as described herein);
[0401] one 04C07-like sequence (as defined herein) and one 34C07-like sequence (as defined herein), and a group, residue, moiety or binding unit that increases the half-life of said amino acid sequence (and preferably an ISV that is directed to a serum protein and in particular to serum albumin, or a peptide that is directed to a serum protein and in particular to serum albumin), suitably linked either directly or using one or more suitable linkers or spacers (as described herein);
[0402] one 17B05-like sequence (as defined herein) and one 18G11-like sequence (as defined herein), and a group, residue, moiety or binding unit that increases the half-life of said amino acid sequence (and preferably an ISV that is directed to a serum protein and in particular to serum albumin, or a peptide that is directed to a serum protein and in particular to serum albumin), suitably linked either directly or using one or more suitable linkers or spacers (as described herein);
[0403] one 17B05-like sequence (as defined herein) and one 34C07-like sequence (as defined herein), and a group, residue, moiety or binding unit that increases the half-life of said amino acid sequence (and preferably an ISV that is directed to a serum protein and in particular to serum albumin, or a peptide that is directed to a serum protein and in particular to serum albumin), suitably linked either directly or using one or more suitable linkers or spacers (as described herein);
[0404] one 18G11-like sequence (as defined herein) and one 34C07-like sequence (as defined herein), and a group, residue, moiety or binding unit that increases the half-life of said amino acid sequence (and preferably an ISV that is directed to a serum protein and in particular to serum albumin, or a peptide that is directed to a serum protein and in particular to serum albumin), suitably linked either directly or using one or more suitable linkers or spacers (as described herein);
   and again such polypeptides (of which some non-limiting examples will be clear to the skilled person based on the disclosure herein—for example, some are listed in Table A-2 below) again form further aspects of the invention.

[0405] Some specifically preferred, but non-limiting polypeptides of the invention comprise or essentially consist of:
[0406] a) one 21F06-like sequence (as defined herein) and one 17B05-like sequence (as defined herein), and group, residue, moiety or binding unit that increases the half-life of said amino acid sequence (and preferably an ISV that is directed to a serum protein and in particular to serum albumin such as Alb-8, or a peptide that is directed to a serum protein and in particular to serum albumin), suitably linked either directly or using one or more suitable linkers or spacers (as described herein). A specific preferred but non-limiting example of such polypeptide is HER3MS00135 (SEQ ID NO:282); or
[0407] b) one 17B05-like sequence (as defined herein) and one 18G11-like sequence (as defined herein), and a group, residue, moiety or binding unit that increases the half-life of said amino acid sequence (and preferably an ISV that is directed to a serum protein and in particular to serum albumin such as Alb-8, or a peptide that is directed to a serum protein and in particular to serum albumin), suitably linked either directly or using one or more suitable linkers or spacers (as described herein). Two specific preferred, but non-limiting examples of such a polypeptide are HER3MS00212 (SEQ ID NO:319) and HER3MS00215 (SEQ ID NO:322).
   Some specifically preferred, but non-limiting examples of polypeptides of the invention are HER3MS00135 (SEQ ID NO:282), HER3MS00212 (SEQ ID NO:319) and HER3MS00212 (SEQ ID NO:322). The invention thus also relates to:
[0408] a) the polypeptide HER3MS00135 (SEQ ID NO:282), as well as to polypeptides that have at least 80%, such as at least 85%, for example at least 90%, and up to 95% or more (such as 98%, 99% or more) sequence identity with HER3MS00135 (SEQ ID NO:282), in which the 21F06-like sequence and 17B05-like sequence present in such polypeptides are preferably as described herein;
[0409] b) the polypeptide HER3MS00212 (SEQ ID NO:319), as well as to polypeptides that have at least 80%, such as at least 85%, for example at least 90%, and up to 95% or more (such as 98%, 99% or more) sequence identity with HER3MS00212 (SEQ ID NO:319), in which the 18G11-like sequence and 17B05-like sequence present in such polypeptides are preferably as described herein;
[0410] c) the polypeptide HER3MS00215 (SEQ ID NO:322), as well as to polypeptides that have at least 80%, such as at least 85%, for example at least 90%, and up to 95% or more (such as 98%, 99% or more) sequence identity with HER3MS00215 (SEQ ID NO:322), in which the 18G11-like sequence and 17B05-like sequence present in such polypeptides are preferably as described herein.

[0411] It has also been found that some of the polypeptides provided by the invention may have an effect on HER3 internalization, and in particular may increase internalisation of the HER3 receptor. This may for example have the effect of reducing the number of HER3 receptors present on the surface of a cell, and thus reducing the ligand-sensitivity of the cell and/or reducing the HER3 mediated signalling in/by said cell and/or modulating other HER3 related biological effects of said cell. Reference is for instance made to Example 17 below. This effect on HER3 internalisation shown by the polypeptides of the invention is particularly surprising because so far, none of the corresponding monovalent building blocks present in said internalisation-promoting polypeptides have been found to have a similar influence on HER3 internalisation.

[0412] It will be clear to the skilled person that for some applications of the polypeptides of the invention, it may be advantageous to use a polypeptide of the invention that can promote or increase HER3 internalisation of a HER3 expressing cell that is exposed to or contacted with such a polypeptide (for example, after administration of said polypeptide to a patient or other subject). Thus, in one aspect, a polypeptide as described herein (which may contain any of the building blocks/ISV's described herein and which may for example be any of the polypeptides described on the previous pages) is preferably such that it is capable of promoting or increasing HER3 internalisation of a cell, for example by at least 5%, such as at least 10%, for example at least 25%, such as 50% or even 90% or more, as measured using a suitable assay, for example the assay of Examples 17 and 20.

[0413] It will also be clear to the skilled person that for other applications of the polypeptides of the invention, it may be advantageous to use a polypeptide of the invention that essentially does not alter, promote or increase HER3 internalisation of a HER3 expressing cell that is exposed to or contacted with such a polypeptide (for example, after administration of said polypeptide to a patient or other subject). Thus, in one aspect, a polypeptide as described herein (which may contain any of the building blocks/ISV's described herein and which may for example be any of the polypeptides described on the previous pages) is preferably such that is does not alter or affect HER3 internalisation of a cell, as measured using a suitable assay, for example the assay of Examples 17 and 20.

[0414] The compounds or polypeptides of the invention can generally be prepared by a method which comprises at least one step of suitably linking the one or more amino acid sequences of the invention to the one or more further groups, residues, moieties or binding units, optionally via the one or more suitable linkers, so as to provide the compound or polypeptide of the invention. Polypeptides of the invention can also be prepared by a method which generally comprises at least the steps of providing a nucleic acid that encodes a polypeptide of the invention, expressing said nucleic acid in a suitable manner, and recovering the expressed polypeptide of the invention. Such methods can be performed in a manner known per se, which will be clear to the skilled person, for example on the basis of the methods and techniques further described herein.

[0415] The process of designing/selecting and/or preparing a compound or polypeptide of the invention, starting from an amino acid sequence of the invention, is also referred to herein as “formatting” said amino acid sequence of the invention; and an amino acid of the invention that is made part of a compound or polypeptide of the invention is said to be “formatted” or to be “in the format of” said compound or polypeptide of the invention. Examples of ways in which an amino acid sequence of the invention can be formatted and examples of such formats will be clear to the skilled person based on the disclosure herein; and such formatted amino acid sequences form a further aspect of the invention.

[0416] In one specific aspect of the invention, a compound of the invention or a polypeptide of the invention may have an increased half-life, compared to the corresponding amino acid sequence of the invention. Some preferred, but non-limiting examples of such compounds and polypeptides will become clear to the skilled person based on the further disclosure herein, and for example comprise amino acid sequences or polypeptides of the invention that have been chemically modified to increase the half-life thereof (for example, by means of pegylation); amino acid sequences of the invention that comprise at least one additional binding site for binding to a serum protein (such as serum albumin); or polypeptides of the invention that comprise at least one amino acid sequence of the invention that is linked to at least one moiety (and in particular at least one amino acid sequence) that increases the half-life of the amino acid sequence of the invention. Examples of polypeptides of the invention that comprise such half-life extending moieties or amino acid sequences will become clear to the skilled person based on the further disclosure herein; and for example include, without limitation, polypeptides in which the one or more amino acid sequences of the invention are suitable linked to one or more serum proteins or fragments thereof (such as (human) serum albumin or suitable fragments thereof) or to one or more binding units that can bind to serum proteins (such as, for example, domain antibodies, amino acid sequences that are suitable for use as a domain antibody, single domain antibodies, amino acid sequences that are suitable for use as a single domain antibody, “dAb”'s, amino acid sequences that are suitable for use as a dAb, or Nanobodies that can bind to serum proteins such as serum albumin (such as human serum albumin), serum immunoglobulins such as IgG, or transferrine; reference is made to the further description and references mentioned herein); polypeptides in which an amino acid sequence of the invention is linked to an Fc portion (such as a human Fc) or a suitable part or fragment thereof; or polypeptides in which the one or more amino acid sequences of the invention are suitable linked to one or more small proteins or peptides that can bind to serum proteins (such as, without limitation, the proteins and peptides described in WO 91/01743, WO 01/45746, WO 02/076489 and to the US provisional application of Ablynx N.V. entitled “Peptides capable of binding to serum proteins” of Ablynx N.V. filed on Dec. 5, 2006 (see also PCT/EP2007/063348).

[0417] Generally, the compounds or polypeptides of the invention with increased half-life preferably have a half-life that is at least 1.5 times, preferably at least 2 times, such as at least 5 times, for example at least 10 times or more than 20 times, greater than the half-life of the corresponding amino acid sequence of the invention per se. For example, the compounds or polypeptides of the invention with increased half-life may have a half-life that is increased with more than 1 hours, preferably more than 2 hours, more preferably more than 6 hours, such as more than 12 hours, or even more than 24, 48 or 72 hours, compared to the corresponding amino acid sequence of the invention per se. In a preferred, but non-limiting aspect of the invention, above increases in half-life are achieved in mammals such as e.g. human, i.e. preferably in humans.

[0418] In a preferred, but non-limiting aspect of the invention, such compounds or polypeptides of the invention have a serum half-life that is increased with more than 1 hours, preferably more than 2 hours, more preferably more than 6 hours, such as more than 12 hours, or even more than 24, 48 or 72 hours, compared to the corresponding amino acid sequence of the invention per se. In a preferred, but non-limiting aspect of the invention, above increases in half-life are achieved in mammals such as e.g. human, i.e. preferably in humans.

[0419] In another preferred, but non-limiting aspect of the invention, such compounds or polypeptides of the invention exhibit a serum half-life in human of at least about 12 hours, preferably at least 24 hours, more preferably at least 48 hours, even more preferably at least 72 hours or more. For example, compounds or polypeptides of the invention may have a half-life of at least 5 days (such as about 5 to 10 days), preferably at least 9 days (such as about 9 to 14 days), more preferably at least about 10 days (such as about 10 to 15 days), or at least about 11 days (such as about 11 to 16 days), more preferably at least about 12 days (such as about 12 to 18 days or more), or more than 14 days (such as about 14 to 19 days). In a preferred, but non-limiting aspect of the invention, above serum half-lifes are achieved in mammals such as e.g. human, i.e. preferably in humans.

[0420] In another aspect, the invention relates to a nucleic acid that encodes an amino acid sequence of the invention or a polypeptide of the invention (or a suitable fragment thereof). Such a nucleic acid will also be referred to herein as a “nucleic acid of the invention” and may for example be in the form of a genetic construct, as further described herein.

[0421] In another aspect, the invention relates to a host or host cell that expresses (or that under suitable circumstances is capable of expressing) an amino acid sequence of the invention and/or a polypeptide of the invention; and/or that contains a nucleic acid of the invention. Some preferred but non-limiting examples of such hosts or host cells will become clear from the further description herein.

[0422] The invention further relates to a product or composition containing or comprising at least one amino acid sequence of the invention, at least one polypeptide of the invention (or a suitable fragment thereof) and/or at least one nucleic acid of the invention, and optionally one or more further components of such compositions known per se, e.g. depending on the intended use of the composition. Such a product or composition may for example be a pharmaceutical composition (as described herein), a veterinary composition or a product or composition for diagnostic use (as also described herein). Some preferred but non-limiting examples of such products or compositions will become clear from the further description herein.

[0423] The invention also relates to the use of an amino acid sequence, Nanobody or polypeptide of the invention, or of a composition comprising the same, in (methods or compositions for) modulating HER3, either in vitro (e.g. in an in vitro or cellular assay) or in vivo (e.g. in an a single cell or in a multicellular organism, and in particular in a mammal, and more in particular in a human being, such as in a human being that is at risk of or suffers from a variety of cancers).

[0424] The invention also relates to methods for modulating HER3, either in vitro (e.g. in an in vitro or cellular assay) or in vivo (e.g. in an a single cell or multicellular organism, and in particular in a mammal, and more in particular in a human being, such as in a human being that is at risk of or suffers from a variety of cancers), which method comprises at least the step of contacting HER3 with at least one amino acid sequence, ISV, Nanobody or polypeptide of the invention, or with a composition comprising the same, in a manner and in an amount suitable to modulate HER3, with at least one amino acid sequence, ISV, Nanobody or polypeptide of the invention.

[0425] The invention also relates to the use of an one amino acid sequence, ISV, Nanobody or polypeptide of the invention in the preparation of a composition (such as, without limitation, a pharmaceutical composition or preparation as further described herein) for modulating HER3, either in vitro (e.g. in an in vitro or cellular assay) or in vivo (e.g. in an a single cell or multicellular organism, and in particular in a mammal, and more in particular in a human being, such as in a human being that is at risk of or suffers from a variety of cancers).

[0426] In the context of the present invention, “modulating” or “to modulate” generally means either reducing or inhibiting the activity of, or alternatively increasing the activity of, HER3, as measured using a suitable in vitro, cellular or in vivo assay (such as those mentioned herein). In particular, “modulating” or “to modulate” may mean either reducing or inhibiting the activity of, or alternatively increasing the activity of HER3, as measured using a suitable in vitro, cellular or in vivo assay (such as those mentioned herein), by at least 1%, preferably at least 5%, such as at least 10% or at least 25%, for example by at least 50%, at least 60%, at least 70%, at least 80%, or 90% or more, compared to activity of HER3 in the same assay under the same conditions but without the presence of the amino acid sequence, ISV, Nanobody or polypeptide of the invention.

[0427] As will be clear to the skilled person, “modulating” may also involve effecting a change (which may either be an increase or a decrease) in affinity, avidity, specificity and/or selectivity of HER3 for one or more of its targets, heterodimerization partners, ligands or substrates; and/or effecting a change (which may either be an increase or a decrease) in the sensitivity of HER3 for one or more conditions in the medium or surroundings in which HER3 is present (such as pH, ion strength, the presence of co-factors, etc.), compared to the same conditions but without the presence of the amino acid sequence, ISV, Nanobody or polypeptide of the invention. As will be clear to the skilled person, this may again be determined in any suitable manner and/or using any suitable assay known per se, such as the assays described herein or in the prior art cited herein.

[0428] “Modulating” may also mean effecting a change (i.e. an activity as an agonist or as an antagonist, respectively) with respect to one or more biological or physiological mechanisms, effects, responses, functions, pathways or activities in which HER3 (or in which its substrate(s), ligand(s) or pathway(s) are involved, such as its signalling pathway or metabolic pathway and their associated biological or physiological effects) is involved. Again, as will be clear to the skilled person, such an action as an agonist or an antagonist may be determined in any suitable manner and/or using any suitable (in vitro and usually cellular or in in vivo assay) assay known per se, such as the assays described herein or in the prior art cited herein. In particular, an action as an agonist or antagonist may be such that an intended biological or physiological activity is increased or decreased, respectively, by at least 1%, preferably at least 5%, such as at least 10% or at least 25%, for example by at least 50%, at least 60%, at least 70%, at least 80%, or 90% or more, compared to the biological or physiological activity in the same assay under the same conditions but without the presence of the amino acid sequence, ISV, Nanobody or polypeptide of the invention.

[0429] Modulating may for example involve reducing or inhibiting the binding of HER3 to one of its substrates or ligands and/or competing with a natural ligand, substrate for binding to HER3. Modulating may also involve activating HER3 or the mechanism or pathway in which it is involved. Modulating may be reversible or irreversible, but for pharmaceutical and pharmacological purposes will usually be in a reversible manner.

[0430] The invention further relates to methods for preparing or generating the amino acid sequences, polypeptides, nucleic acids, host cells, products and compositions described herein. Some preferred but non-limiting examples of such methods will become clear from the further description herein.

[0431] Generally, these methods may comprise the steps of:
[0432] a) providing a set, collection or library of amino acid sequences; and
[0433] b) screening said set, collection or library of amino acid sequences for amino acid sequences that can bind to and/or have affinity for HER3;
   and
[0434] c) isolating the amino acid sequence(s) that can bind to and/or have affinity for HER3.

[0435] In such a method, the set, collection or library of amino acid sequences may be any suitable set, collection or library of amino acid sequences. For example, the set, collection or library of amino acid sequences may be a set, collection or library of immunoglobulin sequences (as described herein), such as a naïve set, collection or library of immunoglobulin sequences; a synthetic or semi-synthetic set, collection or library of immunoglobulin sequences; and/or a set, collection or library of immunoglobulin sequences that have been subjected to affinity maturation.

[0436] Also, in such a method, the set, collection or library of amino acid sequences may be a set, collection or library of heavy chain variable domains (such as V_{H} domains or V_{HH} domains) or of light chain variable domains. For example, the set, collection or library of amino acid sequences may be a set, collection or library of domain antibodies or single domain antibodies, or may be a set, collection or library of amino acid sequences that are capable of functioning as a domain antibody or single domain antibody.

[0437] In a preferred aspect of this method, the set, collection or library of amino acid sequences may be an immune set, collection or library of immunoglobulin sequences, for example derived from a mammal that has been suitably immunized with HER3 or with a suitable antigenic determinant based thereon or derived therefrom, such as an antigenic part, fragment, region, domain, loop or other epitope thereof. In one particular aspect, said antigenic determinant may be an extracellular part, region, domain, loop or other extracellular epitope(s).

[0438] In the above methods, the set, collection or library of amino acid sequences may be displayed on a phage, phagemid, ribosome or suitable micro-organism (such as yeast), such as to facilitate screening. Suitable methods, techniques and host organisms for displaying and screening (a set, collection or library of) amino acid sequences will be clear to the person skilled in the art, for example on the basis of the further disclosure herein. Reference is also made to the review by Hoogenboom in Nature Biotechnology, 23, 9, 1105-1116 (2005).

[0439] In another aspect, the method for generating amino acid sequences comprises at least the steps of:
[0440] a) providing a collection or sample of cells expressing amino acid sequences;
[0441] b) screening said collection or sample of cells for cells that express an amino acid sequence that can bind to and/or have affinity for HER3;
   and
[0442] c) either (i) isolating said amino acid sequence; or (ii) isolating from said cell a nucleic acid sequence that encodes said amino acid sequence, followed by expressing said amino acid sequence.

[0443] For example, when the desired amino acid sequence is an immunoglobulin sequence, the collection or sample of cells may for example be a collection or sample of B-cells. Also, in this method, the sample of cells may be derived from a mammal that has been suitably immunized with HER3 or with a suitable antigenic determinant based thereon or derived therefrom, such as an antigenic part, fragment, region, domain, loop or other epitope thereof. In one particular aspect, said antigenic determinant may be an extracellular part, region, domain, loop or other extracellular epitope(s).

[0444] The above method may be performed in any suitable manner, as will be clear to the skilled person. Reference is for example made to EP 0 542 810, WO 05/19824, WO 04/051268 and WO 04/106377. The screening of step b) is preferably performed using a flow cytometry technique such as FACS. For this, reference is for example made to Lieby et al., Blood, Vol. 97, No. 12, 3820 (2001).

[0445] In another aspect, the method for generating an amino acid sequence directed against HER3 may comprise at least the steps of:
[0446] a) providing a set, collection or library of nucleic acid sequences encoding amino acid sequences;
[0447] b) screening said set, collection or library of nucleic acid sequences for nucleic acid sequences that encode an amino acid sequence that can bind to and/or has affinity for HER3;
   and
[0448] c) isolating said nucleic acid sequence, followed by expressing said amino acid sequence.

[0449] In such a method, the set, collection or library of nucleic acid sequences encoding amino acid sequences may for example be a set, collection or library of nucleic acid sequences encoding a naïve set, collection or library of immunoglobulin sequences; a set, collection or library of nucleic acid sequences encoding a synthetic or semi-synthetic set, collection or library of immunoglobulin sequences; and/or a set, collection or library of nucleic acid sequences encoding a set, collection or library of immunoglobulin sequences that have been subjected to affinity maturation.

[0450] Also, in such a method, the set, collection or library of nucleic acid sequences may encode a set, collection or library of heavy chain variable domains (such as V_{H} domains or V_{HH} domains) or of light chain variable domains. For example, the set, collection or library of nucleic acid sequences may encode a set, collection or library of domain antibodies or single domain antibodies, or a set, collection or library of amino acid sequences that are capable of functioning as a domain antibody or single domain antibody.

[0451] In a preferred aspect of this method, the set, collection or library of nucleic acid sequences may be an immune set, collection or library of nucleic acid sequences, for example derived from a mammal that has been suitably immunized with HER3 or with a suitable antigenic determinant based thereon or derived therefrom, such as an antigenic part, fragment, region, domain, loop or other epitope thereof. In one particular aspect, said antigenic determinant may be an extracellular part, region, domain, loop or other extracellular epitope(s).

[0452] The set, collection or library of nucleic acid sequences may for example encode an immune set, collection or library of heavy chain variable domains or of light chain variable domains. In one specific aspect, the set, collection or library of nucleotide sequences may encode a set, collection or library of V_{HH} sequences.

[0453] In the above methods, the set, collection or library of nucleotide sequences may be displayed on a phage, phagemid, ribosome or suitable micro-organism (such as yeast), such as to facilitate screening. Suitable methods, techniques and host organisms for displaying and screening (a set, collection or library of) nucleotide sequences encoding amino acid sequences will be clear to the person skilled in the art, for example on the basis of the further disclosure herein. Reference is also made to the review by Hoogenboom in Nature Biotechnology, 23, 9, 1105-1116 (2005).

[0454] In another aspect, the method for generating an amino acid sequence directed against HER3 may comprise at least the steps of:
[0455] a) providing a set, collection or library of nucleic acid sequences encoding amino acid sequences;
[0456] b) screening said set, collection or library of nucleic acid sequences for nucleic acid sequences that encode an amino acid sequence that can bind to and/or has affinity for HER3 and that is cross-blocked or is cross blocking a ISV or Nanobody of the invention, e.g. SEQ ID NO: 12 to 26 (Table A-1), or a humanized ISV or Nanobody of the invention; and
[0457] c) isolating said nucleic acid sequence, followed by expressing said amino acid sequence.

[0458] The invention also relates to amino acid sequences that are obtained by the above methods, or alternatively by a method that comprises the one of the above methods and in addition at least the steps of determining the nucleotide sequence or amino acid sequence of said immunoglobulin sequence; and of expressing or synthesizing said amino acid sequence in a manner known per se, such as by expression in a suitable host cell or host organism or by chemical synthesis.

[0459] Also, following the steps above, one or more amino acid sequences of the invention may be suitably humanized (or alternatively camelized); and/or the amino acid sequence(s) thus obtained may be linked to each other or to one or more other suitable amino acid sequences (optionally via one or more suitable linkers) so as to provide a polypeptide of the invention. Also, a nucleic acid sequence encoding an amino acid sequence of the invention may be suitably humanized (or alternatively camelized) and suitably expressed; and/or one or more nucleic acid sequences encoding an amino acid sequence of the invention may be linked to each other or to one or more nucleic acid sequences that encode other suitable amino acid sequences (optionally via nucleotide sequences that encode one or more suitable linkers), after which the nucleotide sequence thus obtained may be suitably expressed so as to provide a polypeptide of the invention.

[0460] The invention further relates to applications and uses of the amino acid sequences, compounds, constructs, polypeptides, nucleic acids, host cells, products and compositions described herein, as well as to methods for the prevention and/or treatment for diseases and disorders associated with HER3. Some preferred but non-limiting applications and uses will become clear from the further description herein.

[0461] The invention also relates to the amino acid sequences, compounds, constructs, polypeptides, nucleic acids, host cells, products and compositions described herein for use in therapy.

[0462] In particular, the invention also relates to the amino acid sequences, compounds, constructs, polypeptides, nucleic acids, host cells, products and compositions described herein for use in therapy of a disease or disorder that can be prevented or treated by administering, to a subject in need thereof, of (a pharmaceutically effective amount of) an amino acid sequence, compound, construct or polypeptide as described herein.

[0463] More in particular, the invention relates to the amino acid sequences, compounds, constructs, polypeptides, nucleic acids, host cells, products and compositions described herein for use in therapy of variety of cancers.

[0464] Other aspects, embodiments, advantages and applications of the invention will also become clear from the further description herein, in which the invention will be described and discussed in more detail with reference to the Nanobodies of the invention and polypeptides of the invention comprising the same, which form some of the preferred aspects of the invention.

[0465] As will become clear from the further description herein, Nanobodies generally offer certain advantages (outlined herein) compared to “dAb's” or similar (single) domain antibodies or immunoglobulin sequences, which advantages are also provided by the Nanobodies of the invention. However, it will be clear to the skilled person that the more general aspects of the teaching below can also be applied (either directly or analogously) to other amino acid sequences of the invention.

### DETAILED DESCRIPTION OF THE INVENTION

[0466] In the present description, examples and claims:
[0467] a) Unless indicated or defined otherwise, all terms used have their usual meaning in the art, which will be clear to the skilled person. Reference is for example made to the standard handbooks mentioned in paragraph a) on page 46 of WO 08/020,079.
[0468] b) Unless indicated otherwise, the term “immunoglobulin single variable domain” is used as a general term to include but not limited to antigen-binding domains or fragments such as V_{HH} domains or V_{H} or V_{L} domains, respectively, as e.g. herein described. The terms antigen-binding molecules or antigen-binding protein are used interchangeably and include also the term nanobodies. The immunoglobulin single variable domains further are light chain variable domain sequences (e.g. a V_{L}-sequence), or heavy chain variable domain sequences (e.g. a V_{H}-sequence); more specifically, they can be heavy chain variable domain sequences that are derived from a conventional four-chain antibody or heavy chain variable domain sequences that are derived from a heavy chain antibody. Accordingly, the immunoglobulin single variable domains can be domain antibodies, or immunoglobulin sequences that are suitable for use as domain antibodies, single domain antibodies, or immunoglobulin sequences that are suitable for use as single domain antibodies, “dAbs”, or immunoglobulin sequences that are suitable for use as dAbs, or nanobodies, or immunoglobulin sequences that are suitable for use as nanobodies, including but not limited to V_{HH} sequences. The invention includes immunoglobulin sequences of different origin, comprising mouse, rat, rabbit, donkey, shark, human and camelid immunoglobulin sequences. The immunoglobulin single variable domain includes fully human, humanized, otherwise sequence optimized or chimeric immunoglobulin sequences. The immunoglobulin single variable domain and structure of an immunoglobulin single variable domain can be considered—without however being limited thereto—to be comprised of four framework regions or “FR's”, which are referred to in the art and herein as “Framework region 1” or “FR1”; as “Framework region 2” or “FR2”; as “Framework region 3” or “FR3”; and as “Framework region 4” or “FR4”, respectively; which framework regions are interrupted by three complementary determining regions or “CDR's”, which are referred to in the art as “Complementarity Determining Region 1” or “CDR1”; as “Complementarity Determining Region 2” or “CDR2”; and as “Complementarity Determining Region 3” or “CDR3”, respectively. It is noted that the terms nanobody or nanobodies are registered trademarks of Ablynx N.V. and thus may also be referred to as Nanobody® and/or Nanobodies®).
[0469] c) Unless indicated otherwise, the terms “immunoglobulin sequence”, “sequence”, “nucleotide sequence” and “nucleic acid” are as described in paragraph b) on page 46 of WO 08/020,079.
[0470] d) Unless indicated otherwise, all methods, steps, techniques and manipulations that are not specifically described in detail can be performed and have been performed in a manner known per se, as will be clear to the skilled person. Reference is for example again made to the standard handbooks and the general background art mentioned herein and to the further references cited therein; as well as to for example the following reviews Presta, Adv. Drug Deliv. Rev. 2006, 58 (5-6): 640-56; Levin and Weiss, Mol. Biosyst. 2006, 2(1): 49-57; Irving et al., J. Immunol. Methods, 2001, 248(1-2), 31-45; Schmitz et al., Placenta, 2000, 21 Suppl. A, S106-12, Gonzales et al., Tumour Biol., 2005, 26(1), 31-43, which describe techniques for protein engineering, such as affinity maturation and other techniques for improving the specificity and other desired properties of proteins such as immunoglobulins.
[0471] e) Amino acid residues will be indicated according to the standard three-letter or one-letter amino acid code. Reference is made to Table A-2 on page 48 of the International application WO 08/020,079 of Ablynx N.V. entitled “Amino acid sequences directed against IL-6R and polypeptides comprising the same for the treatment of diseases and disorders associated with 11-6 mediated signalling”.
[0472] f) For the purposes of comparing two or more nucleotide sequences, the percentage of “sequence identity” between a first nucleotide sequence and a second nucleotide sequence may be calculated or determined as described in paragraph e) on page 49 of WO 08/020,079 (incorporated herein by reference), such as by dividing [the number of nucleotides in the first nucleotide sequence that are identical to the nucleotides at the corresponding positions in the second nucleotide sequence] by [the total number of nucleotides in the first nucleotide sequence] and multiplying by [100%], in which each deletion, insertion, substitution or addition of a nucleotide in the second nucleotide sequence—compared to the first nucleotide sequence—is considered as a difference at a single nucleotide (position); or using a suitable computer algorithm or technique, again as described in paragraph e) on pages 49 of WO 08/020,079 (incorporated herein by reference).
[0473] g) For the purposes of comparing two or more amino acid sequences, the percentage of “sequence identity” between a first amino acid sequence and a second amino acid sequence (also referred to herein as “amino acid identity”) may be calculated or determined as described in paragraph 0 on pages 49 and 50 of WO 08/020,079 (incorporated herein by reference), such as by dividing [the number of amino acid residues in the first amino acid sequence that are identical to the amino acid residues at the corresponding positions in the second amino acid sequence] by [the total number of amino acid residues in the first amino acid sequence] and multiplying by [100%], in which each deletion, insertion, substitution or addition of an amino acid residue in the second amino acid sequence—compared to the first amino acid sequence—is considered as a difference at a single amino acid residue (position), i.e. as an “amino acid difference” as defined herein; or using a suitable computer algorithm or technique, again as described in paragraph f) on pages 49 and 50 of WO 08/020,079 (incorporated herein by reference).
   [0474] Also, in determining the degree of sequence identity between two amino acid sequences, the skilled person may take into account so-called “conservative” amino acid substitutions, as described on page 50 of WO 08/020,079.
   [0475] Any amino acid substitutions applied to the polypeptides described herein may also be based on the analysis of the frequencies of amino acid variations between homologous proteins of different species developed by Schulz et al., Principles of Protein Structure, Springer-Verlag, 1978, on the analyses of structure forming potentials developed by Chou and Fasman, Biochemistry 13: 211, 1974 and Adv. Enzymol., 47: 45-149, 1978, and on the analysis of hydrophobicity patterns in proteins developed by Eisenberg et al., Proc. Nad. Acad. Sci. USA 81: 140-144, 1984; Kyte & Doolittle; J. Molec. Biol. 157: 105-132, 1981, and Goldman et al., Ann. Rev. Biophys. Chem. 15: 321-353, 1986, all incorporated herein in their entirety by reference. Information on the primary, secondary and tertiary structure of Nanobodies is given in the description herein and in the general background art cited above. Also, for this purpose, the crystal structure of a V_{HH} domain from a llama is for example given by Desmyter et al., Nature Structural Biology, Vol. 3, 9, 803 (1996); Spinelli et al., Natural Structural Biology (1996); 3, 752-757; and Decanniere et al., Structure, Vol. 7, 4, 361 (1999). Further information about some of the amino acid residues that in conventional V_{H} domains form the V_{H}/V_{L} interface and potential camelizing substitutions on these positions can be found in the prior art cited above.
[0476] h) Amino acid sequences and nucleic acid sequences are said to be “exactly the same” if they have 100% sequence identity (as defined herein) over their entire length.
[0477] i) When comparing two amino acid sequences, the term “amino acid difference” refers to an insertion, deletion or substitution of a single amino acid residue on a position of the first sequence, compared to the second sequence; it being understood that two amino acid sequences can contain one, two or more such amino acid differences.
[0478] j) When a nucleotide sequence or amino acid sequence is said to “comprise” another nucleotide sequence or amino acid sequence, respectively, or to “essentially consist of” another nucleotide sequence or amino acid sequence, this has the meaning given in paragraph i) on pages 51-52 of WO 08/020,079.
[0479] k) The term “in essentially isolated form” has the meaning given to it in paragraph j) on pages 52 and 53 of WO 08/020,079.
[0480] l) The terms “domain” and “binding domain” have the meanings given to it in paragraph k) on page 53 of WO 08/020,079.
[0481] m) The terms “antigenic determinant” and “epitope”, which may also be used interchangeably herein, have the meanings given to it in paragraph 1) on page 53 of WO 08/020,079.
[0482] n) As further described in paragraph m) on page 53 of WO 08/020,079, an amino acid sequence (such as a Nanobody, an antibody, a polypeptide of the invention, or generally an antigen binding protein or polypeptide or a fragment thereof) that can (specifically) bind to, that has affinity for and/or that has specificity for a specific antigenic determinant, epitope, antigen or protein (or for at least one part, fragment or epitope thereof) is said to be “against” or “directed against” said antigenic determinant, epitope, antigen or protein.
[0483] o) The term “specificity” has the meaning given to it in paragraph n) on pages 53-56 of WO 08/020,079; and as mentioned therein refers to the number of different types of antigens or antigenic determinants to which a particular antigen-binding molecule or antigen-binding protein (such as a Nanobody or a polypeptide of the invention) molecule can bind. The specificity of an antigen-binding protein can be determined based on affinity and/or avidity, as described on pages 53-56 of WO 08/020,079 (incorporated herein by reference), which also describes some preferred techniques for measuring binding between an antigen-binding molecule (such as a Nanobody or polypeptide of the invention) and the pertinent antigen. Typically, antigen-binding proteins (such as the amino acid sequences, Nanobodies and/or polypeptides of the invention) will bind to their antigen with a dissociation constant (K_{D}) of 10⁻⁵ to 10⁻¹² moles/liter or less, and preferably 10⁻⁷ to 10⁻¹² moles/liter or less and more preferably 10⁻⁸ to 10⁻¹² moles/liter (i.e. with an association constant (K_{A}) of 10⁵ to 10¹² liter/moles or more, and preferably 10⁷ to 10¹² liter/moles or more and more preferably 10⁸ to 10¹² liter/moles). Any K_{D} value greater than 10⁴ mol/liter (or any K_{A} value lower than 10⁴ M⁻¹) liters/mol is generally considered to indicate non-specific binding. Preferably, a monovalent immunoglobulin sequence of the invention will bind to the desired antigen with an affinity less than 500 nM, preferably less than 200 nM, more preferably less than 10 nM, such as less than 500 pM. Specific binding of an antigen-binding protein to an antigen or antigenic determinant can be determined in any suitable manner known per se, including, for example, Scatchard analysis and/or competitive binding assays, such as radioimmunoassays (RIA), enzyme immunoassays (EIA) and sandwich competition assays, and the different variants thereof known per se in the art; as well as the other techniques mentioned herein. As will be clear to the skilled person, and as described on pages 53-56 of WO 08/020,079, the dissociation constant may be the actual or apparent dissociation constant. Methods for determining the dissociation constant will be clear to the skilled person, and for example include the techniques mentioned on pages 53-56 of WO 08/020,079.
[0484] p) The half-life of an amino acid sequence, compound or polypeptide of the invention can generally be defined as described in paragraph o) on page 57 of WO 08/020,079 and as mentioned therein refers to the time taken for the serum concentration of the amino acid sequence, compound or polypeptide to be reduced by 50%, in vivo, for example due to degradation of the sequence or compound and/or clearance or sequestration of the sequence or compound by natural mechanisms. The in vivo half-life of an amino acid sequence, compound or polypeptide of the invention can be determined in any manner known per se, such as by pharmacokinetic analysis. Suitable techniques will be clear to the person skilled in the art, and may for example generally be as described in paragraph o) on page 57 of WO 08/020,079. As also mentioned in paragraph o) on page 57 of WO 08/020,079, the half-life can be expressed using parameters such as the t1/2-alpha, t1/2-beta and the area under the curve (AUC). Reference is for example made to the Experimental Part below, as well as to the standard handbooks, such as Kenneth, A et al: Chemical Stability of Pharmaceuticals: A Handbook for Pharmacists and Peters et al, Pharmacokinete analysis: A Practical Approach (1996). Reference is also made to “Pharmacokinetics”, M Gibaldi & D Perron, published by Marcel Dekker, 2nd Rev. edition (1982). The terms “increase in half-life” or “increased half-life” as also as defined in paragraph o) on page 57 of WO 08/020,079 and in particular refer to an increase in the t1/2-beta, either with or without an increase in the t1/2-alpha and/or the AUC or both.
[0485] q) In the context of the present invention, “modulating” or “to modulate” generally means either reducing or inhibiting the activity of, or alternatively increasing the activity of, a target or antigen, as measured using a suitable in vitro, cellular or in vivo assay. In particular, “modulating” or “to modulate” may mean either reducing or inhibiting the activity of, or alternatively increasing a (relevant or intended) biological activity of, a target or antigen, as measured using a suitable in vitro, cellular or in vivo assay (which will usually depend on the target or antigen involved), by at least 1%, preferably at least 5%, such as at least 10% or at least 25%, for example by at least 50%, at least 60%, at least 70%, at least 80%, or 90% or more, compared to activity of the target or antigen in the same assay under the same conditions but without the presence of the construct of the invention.
   [0486] As will be clear to the skilled person, “modulating” may also involve effecting a change (which may either be an increase or a decrease) in affinity, avidity, specificity and/or selectivity of a target or antigen for one or more of its ligands, binding partners, partners for association into a homomultimeric or heteromultimeric form, or substrates; and/or effecting a change (which may either be an increase or a decrease) in the sensitivity of the target or antigen for one or more conditions in the medium or surroundings in which the target or antigen is present (such as pH, ion strength, the presence of co-factors, etc.), compared to the same conditions but without the presence of the construct of the invention. As will be clear to the skilled person, this may again be determined in any suitable manner and/or using any suitable assay known per se, depending on the target or antigen involved.
   [0487] “Modulating” may also mean effecting a change (i.e. an activity as an agonist, as an antagonist or as a reverse agonist, respectively, depending on the target or antigen and the desired biological or physiological effect) with respect to one or more biological or physiological mechanisms, effects, responses, functions, pathways or activities in which the target or antigen (or in which its substrate(s), ligand(s) or pathway(s) are involved, such as its signalling pathway or metabolic pathway and their associated biological or physiological effects) is involved. Again, as will be clear to the skilled person, such an action as an agonist or an antagonist may be determined in any suitable manner and/or using any suitable (in vitro and usually cellular or in assay) assay known per se, depending on the target or antigen involved. In particular, an action as an agonist or antagonist may be such that an intended biological or physiological activity is increased or decreased, respectively, by at least 1%, preferably at least 5%, such as at least 10% or at least 25%, for example by at least 50%, at least 60%, at least 70%, at least 80%, or 90% or more, compared to the biological or physiological activity in the same assay under the same conditions but without the presence of the construct of the invention.
   [0488] Modulating may for example also involve allosteric modulation of the target or antigen; and/or reducing or inhibiting the binding of the target or antigen to one of its substrates or ligands and/or competing with a natural ligand, substrate for binding to the target or antigen. Modulating may also involve activating the target or antigen or the mechanism or pathway in which it is involved. Modulating may for example also involve effecting a change in respect of the folding or confirmation of the target or antigen, or in respect of the ability of the target or antigen to fold, to change its confirmation (for example, upon binding of a ligand), to associate with other (sub)units, or to disassociate.
   [0489] Modulating may for example also involve effecting a change in the ability of the target or antigen to transport other compounds or to serve as a channel for other compounds (such as ions).
   [0490] Modulating may be reversible or irreversible, but for pharmaceutical and pharmacological purposes will usually be in a reversible manner.
[0491] r) In respect of a target or antigen, the term “interaction site” on the target or antigen means a site, epitope, antigenic determinant, part, domain or stretch of amino acid residues on the target or antigen that is a site for binding to a ligand, receptor or other binding partner, a catalytic site, a cleavage site, a site for allosteric interaction, a site involved in multimerisation (such as homomerization or heterodimerization and is in particular heterodimerization) of the target or antigen; or any other site, epitope, antigenic determinant, part, domain or stretch of amino acid residues on the target or antigen that is involved in a biological action or mechanism of the target or antigen. More generally, an “interaction site” can be any site, epitope, antigenic determinant, part, domain or stretch of amino acid residues on the target or antigen to which an amino acid sequence or polypeptide of the invention can bind such that the target or antigen (and/or any pathway, interaction, signalling, biological mechanism or biological effect in which the target or antigen is involved) is modulated (as defined herein).
[0492] s) An amino acid sequence or polypeptide is said to be “specific for” a first target or antigen compared to a second target or antigen when is binds to the first antigen with an affinity (as described above, and suitably expressed as a K_{D} value, K_{A} value, K_{off} rate and/or Kₒₙ rate) that is at least 10 times, such as at least 100 times, and preferably at least 1000 times, and up to 10.000 times or more better than the affinity with which said amino acid sequence or polypeptide binds to the second target or polypeptide. For example, the first antigen may bind to the target or antigen with a K_{D} value that is at least 10 times less, such as at least 100 times less, and preferably at least 1000 times less, such as 10.000 times less or even less than that, than the K_{D} with which said amino acid sequence or polypeptide binds to the second target or polypeptide. Preferably, when an amino acid sequence or polypeptide is “specific for” a first target or antigen compared to a second target or antigen, it is directed against (as defined herein) said first target or antigen, but not directed against said second target or antigen.
[0493] t) The terms “cross-block”, “cross-blocked” and “cross-blocking” are used interchangeably herein to mean the ability of an immunoglobulin single variable domain or polypeptide to interfere with the binding directly or indirectly through allosteric modulation of other immunoglobulin single variable domains or polypeptides of the invention to a given target. The extend to which an immunoglobulin single variable domain or polypeptide of the invention is able to interfere with the binding of another to the target, and therefore whether it can be said to cross-block according to the invention, can be determined using competition binding assays. One particularly suitable quantitative cross-blocking assay uses a FACS- or an AlphaScreen-based approach to measure competition between the labelled (e.g. His tagged, biotinylated or radioactive labelled) immunoglobulin single variable domain or polypeptide according to the invention and the other binding agent in terms of their binding to the target. The experimental part generally describes suitable FACS-based assays for determining whether a binding molecule cross-blocks or is capable of cross-blocking an immunoglobulin single variable domain or polypeptide according to the invention. It will be appreciated that the assay can be used with any of the immunoglobulin single variable domains or other binding agents described herein. Thus, in general, a cross-blocking amino acid sequence or other binding agent according to the invention is for example one which will bind to the target in the above cross-blocking assay such that, during the assay and in the presence of a second amino acid sequence or other binding agent of the invention, the recorded displacement of the immunoglobulin single variable domain or polypeptide according to the invention is up to 100% (e.g. in FACS based competition assay) of the maximum theoretical displacement (e.g. displacement by cold (e.g. unlabeled) immunoglobulin single variable domain or polypeptide that needs to be cross-blocked) by the to be tested potentially cross-blocking agent that is present in an amount of 0.4 mM or less (cross-blocking agent may be another conventional monoclonal antibody such as IgG, classic monovalent antibody fragments (Fab, scFv)) and/or variants (including but not limited to wildtype or engineered diabodies, triabodies, minibodies, VHHs, dAbs, VHs, VLs). Preferred, in a non-limiting aspect, immunoglobulin single variable domains or polypeptides of the invention, have a recorded displacement (as described above) that is between 10% and 100%, more preferably between 50% to 100%.
[0494] u) An amino acid sequence is said to be “cross-reactive” for two different antigens or antigenic determinants (such as serum albumin from two different species of mammal, such as human serum albumin and cyno serum albumin) if it is specific for (as defined herein) both these different antigens or antigenic determinants.
[0495] v) As further described herein, the total number of amino acid residues in a Nanobody can be in the region of 110-130. It should however be noted that parts, fragments, analogs or derivatives (as further described herein) of a Nanobody are not particularly limited as to their length and/or size, as long as such parts, fragments, analogs or derivatives meet the further requirements outlined herein and are also preferably suitable for the purposes described herein;
[0496] w) As further described in paragraph q) on pages 58 and 59 of WO 08/020,079 (incorporated herein by reference), the amino acid residues of a Nanobody are numbered according to the general numbering for V_{H} domains given by Kabat et al. (“Sequence of proteins of immunological interest”, US Public Health Services, NIH Bethesda, Md., Publication No. 91), as applied to V_{HH} domains from Camelids in the article of Riechmann and Muyldermans, J. Immunol. Methods 2000 Jun. 23; 240 (1-2): 185-195 (see for example FIG. 2 of this publication), and accordingly FR1 of a Nanobody comprises the amino acid residues at positions 1-30, CDR1 of a Nanobody comprises the amino acid residues at positions 31-35, FR2 of a Nanobody comprises the amino acids at positions 36-49, CDR2 of a Nanobody comprises the amino acid residues at positions 50-65, FR3 of a Nanobody comprises the amino acid residues at positions 66-94, CDR3 of a Nanobody comprises the amino acid residues at positions 95-102, and FR4 of a Nanobody comprises the amino acid residues at positions 103-113.
[0497] x) The Figures, Sequence Listing and the Experimental Part/Examples are only given to further illustrate the invention and should not be interpreted or construed as limiting the scope of the invention and/or of the appended claims in any way, unless explicitly indicated otherwise herein.

[0498] For a general description of heavy chain antibodies and the variable domains thereof, reference is inter alia made to the prior art cited herein, as well as to the prior art mentioned on page 59 of WO 08/020,079 and to the list of references mentioned on pages 41-43 of the International application WO 06/040153, which prior art and references are incorporated herein by reference.

[0499] In accordance with the terminology used in the art (see the above references), the variable domains present in naturally occurring heavy chain antibodies will also be referred to as “V_{HH} domains”, in order to distinguish them from the heavy chain variable domains that are present in conventional 4-chain antibodies (which will be referred to hereinbelow as “V_{H} domains”) and from the light chain variable domains that are present in conventional 4-chain antibodies (which will be referred to hereinbelow as “V_{L} domains”).

[0500] As mentioned in the prior art referred to above, V_{HH} domains have a number of unique structural characteristics and functional properties which make isolated V_{HH} domains (as well as Nanobodies based thereon, which share these structural characteristics and functional properties with the naturally occurring V_{HH} domains) and proteins containing the same highly advantageous for use as functional antigen-binding domains or proteins. In particular, and without being limited thereto, V_{HH} domains (which have been “designed” by nature to functionally bind to an antigen without the presence of, and without any interaction with, a light chain variable domain) and Nanobodies can function as a single, relatively small, functional antigen-binding structural unit, domain or protein. This distinguishes the V_{HH} domains from the V_{H} and V_{L} domains of conventional 4-chain antibodies, which by themselves are generally not suited for practical application as single antigen-binding proteins or domains, but need to be combined in some form or another to provide a functional antigen-binding unit (as in for example conventional antibody fragments such as Fab fragments; in ScFv's fragments, which consist of a V_{H} domain covalently linked to a V_{L} domain).

[0501] Because of these unique properties, the use of V_{HH} domains and ISV's or Nanobodies as single antigen-binding proteins or as antigen-binding domains (i.e. as part of a larger protein or polypeptide) offers a number of significant advantages over the use of conventional V_{H} and V_{L} domains, scFv's or conventional antibody fragments (such as Fab- or F(ab′)₂-fragments), including the advantages that are listed on pages 60 and 61 of WO 08/020,079.

[0502] In a specific and preferred aspect, the invention provides ISV's or Nanobodies against HER3, and in particular ISV's or Nanobodies against HER3 from a warm-blooded animal, and more in particular ISV's or Nanobodies against HER3 from a mammal, and especially ISV's or Nanobodies against human HER3; as well as proteins and/or polypeptides comprising at least one such ISV or Nanobody.

[0503] In particular, the invention provides ISV's or Nanobodies against HER3, and proteins and/or polypeptides comprising the same, that have improved therapeutic and/or pharmacological properties and/or other advantageous properties (such as, for example, improved ease of preparation and/or reduced costs of goods), compared to conventional antibodies against HER3 or fragments thereof, compared to constructs that could be based on such conventional antibodies or antibody fragments (such as Fab′ fragments, F(ab′)₂ fragments, ScFv constructs, “diabodies” and other multispecific constructs (see for example the review by Holliger and Hudson, Nat. Biotechnol. 2005 September; 23(9):1126-36)), and also compared to the so-called “dAb's” or similar (single) domain antibodies that may be derived from variable domains of conventional antibodies. These improved and advantageous properties will become clear from the further description herein, and for example include, without limitation, one or more of:
[0504] increased affinity and/or avidity for HER3, either in a monovalent format, in a multivalent format (for example in a bivalent format) and/or in a multispecific format (for example one of the multispecific formats described herein below);
[0505] better suitability for formatting in a multivalent format (for example in a bivalent format);
[0506] better suitability for formatting in a multispecific format (for example one of the multispecific formats described herein below);
[0507] improved suitability or susceptibility for “humanizing” substitutions (as defined herein);
[0508] less immunogenicity, either in a monovalent format, in a multivalent format (for example in a bivalent format) and/or in a multispecific format (for example one of the multispecific formats described herein below);
[0509] increased stability, either in a monovalent format, in a multivalent format (for example in a bivalent format) and/or in a multispecific format (for example one of the multispecific formats described herein below);
[0510] increased specificity towards HER3, either in a monovalent format, in a multivalent format (for example in a bivalent format) and/or in a multispecific format (for example one of the multispecific formats described herein below);
[0511] decreased or where desired increased cross-reactivity with HER3 from different species;
   and/or
[0512] one or more other improved properties desirable for pharmaceutical use (including prophylactic use and/or therapeutic use) and/or for diagnostic use (including but not limited to use for imaging purposes), either in a monovalent format, in a multivalent format (for example in a bivalent format) and/or in a multispecific format (for example one of the multispecific formats described herein below).

[0513] As generally described herein for the amino acid sequences of the invention, the ISV's or Nanobodies of the invention are preferably in essentially isolated form (as defined herein), or form part of a protein or polypeptide of the invention (as defined herein), which may comprise or essentially consist of one or more ISV's or Nanobodies of the invention and which may optionally further comprise one or more further amino acid sequences (all optionally linked via one or more suitable linkers). For example, and without limitation, the one or more amino acid sequences of the invention may be used as a binding unit in such a protein or polypeptide, which may optionally contain one or more further amino acid sequences that can serve as a binding unit (i.e. against one or more other targets than HER3), so as to provide a monovalent, multivalent or multispecific polypeptide of the invention, respectively, all as described herein. In particular, such a protein or polypeptide may comprise or essentially consist of one or more ISV's or Nanobodies of the invention and optionally one or more (other) ISV's or Nanobodies (i.e. directed against other targets than HER3), all optionally linked via one or more suitable linkers, so as to provide a monovalent, multivalent or multispecific ISV or Nanobody construct, respectively, as further described herein. Such proteins or polypeptides may also be in essentially isolated form (as defined herein).

[0514] In an ISV or Nanobody of the invention, the binding site for binding against HER3 is preferably formed by the CDR sequences. Optionally, an ISV or Nanobody of the invention may also, and in addition to the at least one binding site for binding against HER3, contain one or more further binding sites for binding against other antigens, proteins or targets. For methods and positions for introducing such second binding sites, reference is for example made to Keck and Huston, Biophysical Journal, 71, October 1996, 2002-2011; EP 0 640 130; and WO 06/07260.

[0515] As generally described herein for the amino acid sequences of the invention, when an ISV or Nanobody of the invention (or a polypeptide of the invention comprising the same) is intended for administration to a subject (for example for therapeutic and/or diagnostic purposes as described herein), it is preferably directed against human HER3; whereas for veterinary purposes, it is preferably directed against HER3 from the species to be treated. Also, as with the amino acid sequences of the invention, an ISV or Nanobody of the invention may or may not be cross-reactive (i.e. directed against HER3 from two or more species of mammal, such as against human HER3 and HER3 from at least one of the species of mammal mentioned herein).

[0516] Also, again as generally described herein for the amino acid sequences of the invention, the ISV's or Nanobodies of the invention may generally be directed against any antigenic determinant, epitope, part, domain, subunit or confirmation (where applicable) of HER3. However, it is generally assumed and preferred that the ISV's or Nanobodies of the invention (and polypeptides comprising the same) are directed against the Heregulin (or “HRG”) binding site and the heterodimerization interaction site.

[0517] As already described herein, the amino acid sequence and structure of an ISV or Nanobody can be considered—without however being limited thereto—to be comprised of four framework regions or “FR's” (or sometimes also referred to as “FW's”), which are referred to in the art and herein as “Framework region 1” or “FR1”; as “Framework region 2” or “FR2”; as “Framework region 3” or “FR3”; and as “Framework region 4” or “FR4”, respectively; which framework regions are interrupted by three complementary determining regions or “CDR's”, which are referred to in the art as “Complementarity Determining Region 1” or “CDR1”; as “Complementarity Determining Region 2” or “CDR2”; and as “Complementarity Determining Region 3” or “CDR3”, respectively. Some preferred framework sequences and CDR's (and combinations thereof) that are present in the ISV's or Nanobodies of the invention are as described herein. Other suitable CDR sequences can be obtained by the methods described herein.

[0518] According to a non-limiting but preferred aspect of the invention, (the CDR sequences present in) the ISV's or Nanobodies of the invention are such that:
[0519] the ISV's or Nanobodies can bind to HER3 with a dissociation constant (K_{D}) of 10⁻⁵ to 10⁻¹² moles/liter or less, and preferably 10⁻⁷ to 10⁻¹² moles/liter or less and more preferably 10⁻⁸ to 10⁻¹² moles/liter (i.e. with an association constant (K_{A}) of 10⁵ to 10¹² liter/moles or more, and preferably 10⁷ to 10¹² liter/moles or more and more preferably 10⁸ to 10¹² liter/moles);
   and/or such that:
[0520] the ISV's or Nanobodies can bind to HER3 with a kₒₙ-rate of between 10² M⁻¹s⁻¹ to about 10⁷ M⁻¹s⁻¹, preferably between 10³ M⁻¹s⁻¹ and 10⁷ M⁻¹s⁻¹, more preferably between 10⁴ M⁻¹s⁻¹ and 10⁷ M⁻¹s⁻¹, such as between 10⁵ M⁻¹s⁻¹ and 10⁷ M⁻¹s⁻¹;
   and/or such that they:
[0521] the ISV's or Nanobodies can bind to HER3 with a k_{off} rate between 1 s⁻¹ (t_{1/2}=0.69 s) and 10⁻⁶ s⁻¹ (providing a near irreversible complex with a t_{1/2} of multiple days), preferably between 10⁻² s⁻¹ and 10⁻⁶ s⁻¹, more preferably between 10⁻³ s⁻¹ and 10⁻⁶ s⁻¹, such as between 10⁻⁴ s⁻¹ and 10⁻⁶ s⁻¹.

[0522] Preferably, (the CDR sequences present in) the ISV's or Nanobodies of the invention are such that: a monovalent ISV or Nanobody of the invention (or a polypeptide that contains only one ISV or Nanobody of the invention) is preferably such that it will bind to HER3 with an affinity less than 500 nM, preferably less than 100 nM, more preferably less than 10 nM, such as less than 5 nM.

[0523] The affinity of the ISV or Nanobody of the invention against HER3 can be determined in a manner known per se, for example using the general techniques for measuring K_{D}. K_{A}, k_{off} or kₒₙ mentioned herein, as well as some of the specific assays described herein.

[0524] Some preferred IC50 values for binding of the ISV's or Nanobodies of the invention (and of polypeptides comprising the same) to HER3 will become clear from the further description and examples herein.

[0525] In a preferred but non-limiting aspect, the invention relates to an ISV or Nanobody (as defined herein) against HER3, which consists of 4 framework regions (FR1 to FR4 respectively) and 3 complementarity determining regions (CDR1 to CDR3 respectively), in which:

[0526] CDR1 is chosen from the group consisting of:
[0527] a) the amino acid sequences of SEQ ID NO's: 57 to 71;
[0528] b) amino acid sequences that have at least 80% amino acid identity with at least one of the amino acid sequences of SEQ ID NO's: 57 to 71;
[0529] c) amino acid sequences that have 3, 2, or 1 amino acid difference with at least one of the amino acid sequences of SEQ ID NO's: 57 to 71;
   and/or

[0530] CDR2 is chosen from the group consisting of:
[0531] d) the amino acid sequences of SEQ ID NO's: 87 to 101;
[0532] e) amino acid sequences that have at least 80% amino acid identity with at least one of the amino acid sequences of SEQ ID NO's: 87 to 101;
[0533] f) amino acid sequences that have 3, 2, or 1 amino acid difference with at least one of the amino acid sequences of SEQ ID NO's: 87 to 101;
   and/or

[0534] CDR3 is chosen from the group consisting of:
[0535] g) the amino acid sequences of SEQ ID NO's: 117 to 131;
[0536] h) amino acid sequences that have at least 80% amino acid identity with at least one of the amino acid sequences of SEQ ID NO's: 117 to 131;
[0537] i) amino acid sequences that have 3, 2, or 1 amino acid difference with at least one of the amino acid sequences of SEQ ID NO's: 117 to 131;
   or any suitable fragment of such an amino acid sequence.

[0538] In particular, according to this preferred but non-limiting aspect, the invention relates to an ISV or Nanobody (as defined herein) against HER3, which consists of 4 framework regions (FR1 to FR4 respectively) and 3 complementarity determining regions (CDR1 to CDR3 respectively), in which:

[0539] CDR1 is chosen from the group consisting of:
[0540] a) the amino acid sequences of SEQ ID NO's: 57 to 71;
[0541] b) amino acid sequences that have at least 80% amino acid identity with at least one of the amino acid sequences of SEQ ID NO's: 57 to 71;
[0542] c) amino acid sequences that have 3, 2, or 1 amino acid difference with at least one of the amino acid sequences of SEQ ID NO's: 57 to 71;
   and

[0543] CDR2 is chosen from the group consisting of:
[0544] d) the amino acid sequences of SEQ ID NO's: 87 to 101;
[0545] e) amino acid sequences that have at least 80% amino acid identity with at least one of the amino acid sequences of SEQ ID NO's: 87 to 101;
[0546] f) amino acid sequences that have 3, 2, or 1 amino acid difference with at least one of the amino acid sequences of SEQ ID NO's: 87 to 101;
   and

[0547] CDR3 is chosen from the group consisting of:
[0548] g) the amino acid sequences of SEQ ID NO's: 117 to 131;
[0549] h) amino acid sequences that have at least 80% amino acid identity with at least one of the amino acid sequences of SEQ ID NO's: 117 to 131;
[0550] i) amino acid sequences that have 3, 2, or 1 amino acid difference with at least one of the amino acid sequences of SEQ ID NO's: 117 to 131;
   or any suitable fragment of such an amino acid sequences.

[0551] As generally mentioned herein for the amino acid sequences of the invention, when an ISV or Nanobody of the invention contains one or more CDR1 sequences according to b) and/or c):
[0552] i) any amino acid substitution in such a CDR according to b) and/or c) is preferably, and compared to the corresponding CDR according to a), a conservative amino acid substitution (as defined herein);
   and/or
[0553] ii) the CDR according to b) and/or c) preferably only contains amino acid substitutions, and no amino acid deletions or insertions, compared to the corresponding CDR according to a);
   and/or
[0554] iii) the CDR according to b) and/or c) may be a CDR that is derived from a CDR according to a) by means of affinity maturation using one or more techniques of affinity maturation known per se.

[0555] Similarly, when an ISV or Nanobody of the invention contains one or more CDR2 sequences according to e) and/or f):
[0556] i) any amino acid substitution in such a CDR according to e) and/or f) is preferably, and compared to the corresponding CDR according to d), a conservative amino acid substitution (as defined herein);
   and/or
[0557] ii) the CDR according to e) and/or f), preferably only contains amino acid substitutions, and no amino acid deletions or insertions, compared to the corresponding CDR according to d);
   and/or
[0558] iii) the CDR according to e) and/or f) may be a CDR that is derived from a CDR according to d) by means of affinity maturation using one or more techniques of affinity maturation known per se.

[0559] Also, similarly, when an ISV or Nanobody of the invention contains one or more CDR3 sequences according to h) and/or i):
[0560] i) any amino acid substitution in such a CDR according to h) and/or i) is preferably, and compared to the corresponding CDR according to g), a conservative amino acid substitution (as defined herein);
   and/or
[0561] ii) the CDR according to h) and/or i) preferably only contains amino acid substitutions, and no amino acid deletions or insertions, compared to the corresponding CDR according to g);
   and/or
[0562] iii) the CDR according to h) and/or i) may be a CDR that is derived from a CDR according to g) by means of affinity maturation using one or more techniques of affinity maturation known per se.

[0563] It should be understood that the last three paragraphs generally apply to any ISV or Nanobody of the invention that comprises one or more CDR1 sequences, CDR2 sequences and/or CDR3 sequences according to b), c), e), f), h) or i), respectively.

[0564] Of the ISV's or Nanobodies of the invention, ISV's or Nanobodies comprising one or more of the CDR's explicitly listed above are particularly preferred; ISV's or Nanobodies comprising two or more of the CDR's explicitly listed above are more particularly preferred; and ISV's or Nanobodies comprising three of the CDR's explicitly listed above are most particularly preferred.

[0565] Some particularly preferred, but non-limiting combinations of CDR sequences, as well as preferred combinations of CDR sequences and framework sequences, are mentioned in Table B-1 below, which lists the CDR sequences and framework sequences that are present in a number of preferred (but non-limiting) ISV's or Nanobodies of the invention. As will be clear to the skilled person, a combination of CDR1, CDR2 and CDR3 sequences that occur in the same clone (i.e. CDR1, CDR2 and CDR3 sequences that are mentioned on the same line in Table B-1) will usually be preferred (although the invention in its broadest sense is not limited thereto, and also comprises other suitable combinations of the CDR sequences mentioned in Table B-1). Also, a combination of CDR sequences and framework sequences that occur in the same clone (i.e. CDR sequences and framework sequences that are mentioned on the same line in Table B-1) will usually be preferred (although the invention in its broadest sense is not limited thereto, and also comprises other suitable combinations of the CDR sequences and framework sequences mentioned in Table B-1, as well as combinations of such CDR sequences and other suitable framework sequences, e.g. as further described herein).

[0566] Also, in the ISV's or Nanobodies of the invention that comprise the combinations of CDR's mentioned in Table B-1, each CDR can be replaced by a CDR chosen from the group consisting of amino acid sequences that have at least 80%, preferably at least 90%, more preferably at least 95%, even more preferably at least 99% sequence identity (as defined herein) with the mentioned CDR's; in which:
[0567] i) any amino acid substitution in such a CDR is preferably, and compared to the corresponding CDR sequence mentioned in Table B-1, a conservative amino acid substitution (as defined herein);
   and/or
[0568] ii) any such CDR sequence preferably only contains amino acid substitutions, and no amino acid deletions or insertions, compared to the corresponding CDR sequence mentioned in Table B-1;
   and/or
[0569] iii) any such CDR sequence is a CDR that is derived by means of a technique for affinity maturation known per se, and in particular starting from the corresponding CDR sequence mentioned in Table B-1.

[0570] However, as will be clear to the skilled person, the (combinations of) CDR sequences, as well as (the combinations of) CDR sequences and framework sequences mentioned in Table B-1 will generally be preferred.

TABLE B-1
Preferred combinations of CDR sequences, preferred combinations of framework
sequences, and preferred combinations of framework and CDR sequences.
(“ID” refers to the SEQ ID NO as used herein)

| Clone | ID | FR1 | ID | CDR1 | ID | FR2 | ID | CDR2 | ID | FR3 | ID | CDR3 | ID | FR4 |
|---|---|---|---|---|---|---|---|---|---|---|---|---|---|---|
| 18F05 | 42 | EVQLVESGGG | 57 | SYWMY | 72 | WVRQAPG | 87 | AISPGGVE | 102 | RFTISRDNAKNT | 117 | LTSFATP | 132 | ESQGTQV |
| | | LVQPGGSLRL | | | | KGVEWVS | | RYTDSVKG | | LYLQMNSLKSE | | | | TVSS |
| | | SCVASGFTFS | | | | | | | | DTAMYYCAR | | | | |
| 17B05 | 43 | EVQLVESGGG | 58 | LNAMA | 73 | WYRQAPG | 88 | GIFGVGST | 103 | RFTISRDIAKNTV | 118 | SSVTRGSSDY | 133 | WGQGTQ |
| | | LVQPGGSLRL | | | | KERELVA | | RYADSVKG | | FLQMNSLNSEDT | | | | VTVSS |
| | | SCAASGSIGG | | | | | | | | AVYYCRM | | | | |
| 18B05 | 44 | EVQLVESGGG | 59 | SAPMG | 74 | WYRQAPG | 89 | YISGDERI | 104 | RFTISRDTTKNT | 119 | DVKVRH | 134 | WGQGTQ |
| | | LVQAGGSLRL | | | | KERELVA | | WYGDSVKG | | LYLQMNSLKPE | | | | VTVSS |
| | | SCAASGLTFG | | | | | | | | DTAVYYCVS | | | | |
| 04C07 | 45 | EVQLVESGGG | 60 | SYPMS | 75 | WVRQAPG | 90 | TVSPGGITT | 105 | RFTISRDNAKNT | 120 | DLNN | 135 | RGQGTQV |
| | | LVQAGGSLRL | | | | KGPAWVS | | SYADSVKG | | LYLQMNSLKPE | | | | TVSS |
| | | SCAASGFTFS | | | | | | | | DTAVYYCLR | | | | |
| 18G11 | 46 | EVQLVESGGG | 61 | INAMG | 76 | WYRQAPG | 91 | LITSSDTTD | 106 | RFTISRDNTWNA | 121 | DHYSMGVPEKRVIM | 136 | YGQGTQV |
| | | LVQPGGSLRL | | | | KRRELVA | | YAESVEG | | VYLQMNSLKPE | | | | TVSS |
| | | SCAASGTLFK | | | | | | | | DTAVYYCHS | | | | |
| 18E08 | 47 | EVQLVESGGG | 62 | INAMG | 77 | WYRQAPG | 92 | LITSSDTTD | 107 | RFTISRDNTWNA | 122 | DHYSMGVPEKRVIM | 137 | YGQGTQV |
| | | LVQPGGSLRL | | | | KQRELVA | | YAESVEG | | VYLQMNSLKPE | | | | TVSS |
| | | SCAASGTLFK | | | | | | | | DTAVYYCHS | | | | |
| 34C07 | 48 | EVQLVESGGG | 63 | INAMA | 78 | WYRQAPG | 93 | EITAGGST | 108 | RFTISVDNAWNT | 123 | DHYTTWDRRSAY | 138 | WGQGTQ |
| | | LVQPGGSLGL | | | | KQRELVA | | NYADSVKG | | LYLQMNSLKVE | | | | VTVSS |
| | | SCVASGSIFR | | | | | | | | DTAVYYCNL | | | | |
| 05A09 | 49 | EVQLVESGGG | 64 | DYAIG | 79 | WFRQAPG | 94 | CISSSDGST | 109 | RFTISSDNAKNT | 124 | ERRRGYSDLCRFYY | 139 | WGKGTQ |
| | | LVQAGGSLRL | | | | KEREGVS | | VYADSVKG | | VYLQMNSLKPE | | GMDY | | VTVSS |
| | | SCAASGFTFD | | | | | | | | DTAVYYCAA | | | | |
| 17C08 | 50 | EVQLVESGGG | 65 | SYALG | 80 | WFRRAPG | 95 | ATDRLGD | 110 | RFTISRDNAKNT | 125 | GAVRYGVSTSPMN | 140 | WGQGTQ |
| | | LMQAGDSLR | | | | KERECVA | | NTYFPDSV | | LYLQMNNLKPE | | YNY | | VTVSS |
| | | LSCAASGRAFS | | | | | | KG | | DTAVYYCAA | | | | |
| 21B02 | 51 | EVQLVESGGG | 66 | YYTIG | 81 | WFRQAPG | 96 | CISSRDGD | 111 | RFTISRDNAKNT | 126 | SASDYGLGLELFHD | 141 | WGQGTQ |
| | | LVQPGGSLRL | | | | KEREGVS | | SYYADSVKG | | AYLQMNSLKPE | | EYNY | | VTVSS |
| | | SCAASGFTFD | | | | | | | | DTAVYYCAA | | | | |
| 21F06 | 52 | EVQLVESGGG | 67 | LNAMG | 82 | WFRQGPG | 97 | AIDWSDGN | 112 | RFTISRDNAKNT | 127 | DTPPWGPMIYIESYDS | 142 | WGQGTQ |
| | | LVQAGGSLRL | | | | KDREFVA | | KDYADSV | | VYLQMNSLKPE | | | | VTVSS |
| | | SCAASGRTYY | | | | | | KG | | DTAVYYCAA | | | | |
| 23F05 | 53 | EVQLVESGGG | 68 | GYAIG | 83 | WFRQAPG | 98 | CISGGDGR | 113 | RFTVSSDNAKNT | 128 | IWGPYCSDSYEYLY | 143 | WGQGTQ |
| | | LVQAGGSLRL | | | | KEREGVS | | SYYADSVKG | | LYLEMNSLKPED | | EYDY | | VTVSS |
| | | SCAASGFTFD | | | | | | | | TAVYYCAV | | | | |
| 34A04 | 54 | EVQLVESGGG | 69 | DYTIG | 84 | WFRQAPG | 99 | CISNNDGS | 114 | RFTISSDNAKNT | 129 | SPHGCWYDLIPLQA | 144 | WGQGTQ |
| | | LVQAGGSLRL | | | | KEREEIS | | TYYTNSVKG | | VYLQMNSLKPE | | DFGS | | VTVSS |
| | | SCAASGFTFD | | | | | | | | DTAVYYCAA | | | | |
| 17E08 | 55 | EVQLVESGGG | 70 | LNAMG | 85 | WYRQTPG | 100 | GITSITRVG | 115 | RFTISGDYAKNT | 130 | SIVKSGGADY | 145 | WGQGTQ |
| | | LVQPGGSLRL | | | | KERELVA | | STRYADSA | | VYLQMNSLKPE | | | | VTVSS |
| | | SCSASGSIFG | | | | | | KG | | DTGVYYCRM | | | | |
| 4F10 | 56 | EVQLVESGGG | 71 | FYHMA | 86 | WYRQAPG | 101 | RIYTGGDTI | 116 | RFTISRDNSKNT | 131 | FREYHI | 146 | WGQGTQ |
| | | LVQPGGSLKL | | | | EQRELVA | | YGDSVLG | | VYLQMNTLKPE | | | | VTVSS |
| | | SCVASGSMFR | | | | | | | | DTGVYYCNA | | | | |

[0571] Thus, in the Nanobodies of the invention, at least one of the CDR1, CDR2 and CDR3 sequences present is suitably chosen from the group consisting of the CDR1, CDR2 and CDR3 sequences, respectively, listed in Table B-1; or from the group of CDR1, CDR2 and CDR3 sequences, respectively, that have at least 80%, preferably at least 90%, more preferably at least 95%, even more preferably at least 99% “sequence identity” (as defined herein) with at least one of the CDR1, CDR2 and CDR3 sequences, respectively, listed in Table B-1; and/or from the group consisting of the CDR1, CDR2 and CDR3 sequences, respectively, that have 3, 2 or only 1 “amino acid difference(s)” (as defined herein) with at least one of the CDR1, CDR2 and CDR3 sequences, respectively, listed in Table B-1.

[0572] In this context, by “suitably chosen” is meant that, as applicable, a CDR1 sequence is chosen from suitable CDR1 sequences (i.e. as defined herein), a CDR2 sequence is chosen from suitable CDR2 sequences (i.e. as defined herein), and a CDR3 sequence is chosen from suitable CDR3 sequence (i.e. as defined herein), respectively. More in particular, the CDR sequences are preferably chosen such that the Nanobodies of the invention bind to HER3 with an affinity (suitably measured and/or expressed as a K_{D}-value (actual or apparent), a K_{A}-value (actual or apparent), a kₒₙ-rate and/or a k_{off}-rate, or alternatively as an IC₅₀ value, as further described herein) that is as defined herein.

[0573] In particular, in the Nanobodies of the invention, at least the CDR3 sequence present is suitably chosen from the group consisting of the CDR3 sequences listed in Table B-1 or from the group of CDR3 sequences that have at least 80%, preferably at least 90%, more preferably at least 95%, even more preferably at least 99% sequence identity with at least one of the CDR3 sequences listed in Table B-1; and/or from the group consisting of the CDR3 sequences that have 3, 2 or only 1 amino acid difference(s) with at least one of the CDR3 sequences listed in Table B-1.

[0574] Preferably, in the Nanobodies of the invention, at least two of the CDR1, CDR2 and CDR3 sequences present are suitably chosen from the group consisting of the CDR1, CDR2 and CDR3 sequences, respectively, listed in Table B-1 or from the group consisting of CDR1, CDR2 and CDR3 sequences, respectively, that have at least 80%, preferably at least 90%, more preferably at least 95%, even more preferably at least 99% sequence identity with at least one of the CDR1, CDR2 and CDR3 sequences, respectively, listed in Table B-1; and/or from the group consisting of the CDR1, CDR2 and CDR3 sequences, respectively, that have 3, 2 or only 1 “amino acid difference(s)” with at least one of the CDR1, CDR2 and CDR3 sequences, respectively, listed in Table B-1.

[0575] In particular, in the Nanobodies of the invention, at least the CDR3 sequence present is suitably chosen from the group consisting of the CDR3 sequences listed in Table B-1 or from the group of CDR3 sequences that have at least 80%, preferably at least 90%, more preferably at least 95%, even more preferably at least 99% sequence identity with at least one of the CDR3 sequences listed in Table B-1, respectively; and at least one of the CDR1 and CDR2 sequences present is suitably chosen from the group consisting of the CDR1 and CDR2 sequences, respectively, listed in Table B-1 or from the group of CDR1 and CDR2 sequences, respectively, that have at least 80%, preferably at least 90%, more preferably at least 95%, even more preferably at least 99% sequence identity with at least one of the CDR1 and CDR2 sequences, respectively, listed in Table B-1; and/or from the group consisting of the CDR1 and CDR2 sequences, respectively, that have 3, 2 or only 1 amino acid difference(s) with at least one of the CDR1 and CDR2 sequences, respectively, listed in Table B-1.

[0576] Most preferably, in the Nanobodies of the invention, all three CDR1, CDR2 and CDR3 sequences present are suitably chosen from the group consisting of the CDR1, CDR2 and CDR3 sequences, respectively, listed in Table B-1 or from the group of CDR1, CDR2 and CDR3 sequences, respectively, that have at least 80%, preferably at least 90%, more preferably at least 95%, even more preferably at least 99% sequence identity with at least one of the CDR1, CDR2 and CDR3 sequences, respectively, listed in Table B-1; and/or from the group consisting of the CDR1, CDR2 and CDR3 sequences, respectively, that have 3, 2 or only 1 amino acid difference(s) with at least one of the CDR1, CDR2 and CDR3 sequences, respectively, listed in Table B-1.

[0577] Even more preferably, in the Nanobodies of the invention, at least one of the CDR1, CDR2 and CDR3 sequences present is suitably chosen from the group consisting of the CDR1, CDR2 and CDR3 sequences, respectively, listed in Table B-1. Preferably, in this aspect, at least one or preferably both of the other two CDR sequences present are suitably chosen from CDR sequences that have at least 80%, preferably at least 90%, more preferably at least 95%, even more preferably at least 99% sequence identity with at least one of the corresponding CDR sequences, respectively, listed in Table B-1; and/or from the group consisting of the CDR sequences that have 3, 2 or only 1 amino acid difference(s) with at least one of the corresponding sequences, respectively, listed in Table B-1.

[0578] In particular, in the Nanobodies of the invention, at least the CDR3 sequence present is suitably chosen from the group consisting of the CDR3 listed in Table B-1. Preferably, in this aspect, at least one and preferably both of the CDR1 and CDR2 sequences present are suitably chosen from the groups of CDR1 and CDR2 sequences, respectively, that have at least 80%, preferably at least 90%, more preferably at least 95%, even more preferably at least 99% sequence identity with the CDR1 and CDR2 sequences, respectively, listed in Table B-1; and/or from the group consisting of the CDR1 and CDR2 sequences, respectively, that have 3, 2 or only 1 amino acid difference(s) with at least one of the CDR1 and CDR2 sequences, respectively, listed in Table B-1.

[0579] Even more preferably, in the Nanobodies of the invention, at least two of the CDR1, CDR2 and CDR3 sequences present are suitably chosen from the group consisting of the CDR1, CDR2 and CDR3 sequences, respectively, listed in Table B-1. Preferably, in this aspect, the remaining CDR sequence present is suitably chosen from the group of CDR sequences that have at least 80%, preferably at least 90%, more preferably at least 95%, even more preferably at least 99% sequence identity with at least one of the corresponding CDR sequences listed in Table B-1; and/or from the group consisting of CDR sequences that have 3, 2 or only 1 amino acid difference(s) with at least one of the corresponding sequences listed in Table B-1.

[0580] In particular, in the Nanobodies of the invention, at least the CDR3 sequence is suitably chosen from the group consisting of the CDR3 sequences listed in Table B-1, and either the CDR1 sequence or the CDR2 sequence is suitably chosen from the group consisting of the CDR1 and CDR2 sequences, respectively, listed in Table B-1. Preferably, in this aspect, the remaining CDR sequence present is suitably chosen from the group of CDR sequences that have at least 80%, preferably at least 90%, more preferably at least 95%, even more preferably at least 99% sequence identity with at least one of the corresponding CDR sequences listed in Table B-1; and/or from the group consisting of CDR sequences that have 3, 2 or only 1 amino acid difference(s) with the corresponding CDR sequences listed in Table B-1.

[0581] Even more preferably, in the Nanobodies of the invention, all three CDR1, CDR2 and CDR3 sequences present are suitably chosen from the group consisting of the CDR1, CDR2 and CDR3 sequences, respectively, listed in Table B-1.

[0582] Also, generally, the combinations of CDR's listed in Table B-1 (i.e. those mentioned on the same line in Table B-1) are preferred. Thus, it is generally preferred that, when a CDR in a Nanobody of the invention is a CDR sequence mentioned in Table B-1 or is suitably chosen from the group of CDR sequences that have at least 80%, preferably at least 90%, more preferably at least 95%, even more preferably at least 99% sequence identity with a CDR sequence listed in Table B-1; and/or from the group consisting of CDR sequences that have 3, 2 or only 1 amino acid difference(s) with a CDR sequence listed in Table B-1, that at least one and preferably both of the other CDR's are suitably chosen from the CDR sequences that belong to the same combination in Table B-1 (i.e. mentioned on the same line in Table B-1) or are suitably chosen from the group of CDR sequences that have at least 80%, preferably at least 90%, more preferably at least 95%, even more preferably at least 99% sequence identity with the CDR sequence(s) belonging to the same combination and/or from the group consisting of CDR sequences that have 3, 2 or only 1 amino acid difference(s) with the CDR sequence(s) belonging to the same combination. The other preferences indicated in the above paragraphs also apply to the combinations of CDR's mentioned in Table B-1.

[0583] Thus, by means of non-limiting examples, a Nanobody of the invention can for example comprise a CDR1 sequence that has more than 80% sequence identity with one of the CDR1 sequences mentioned in Table B-1, a CDR2 sequence that has 3, 2 or 1 amino acid difference with one of the CDR2 sequences mentioned in Table B-1 (but belonging to a different combination), and a CDR3 sequence.

[0584] Some preferred Nanobodies of the invention may for example comprise: (1) a CDR1 sequence that has more than 80% sequence identity with one of the CDR1 sequences mentioned in Table B-1; a CDR2 sequence that has 3, 2 or 1 amino acid difference with one of the CDR2 sequences mentioned in Table B-1 (but belonging to a different combination); and a CDR3 sequence that has more than 80% sequence identity with one of the CDR3 sequences mentioned in Table B-1 (but belonging to a different combination); or (2) a CDR1 sequence that has more than 80% sequence identity with one of the CDR1 sequences mentioned in Table B-1; a CDR2 sequence, and one of the CDR3 sequences listed in Table B-1; or (3) a CDR1 sequence; a CDR2 sequence that has more than 80% sequence identity with one of the CDR2 sequence listed in Table B-1; and a CDR3 sequence that has 3, 2 or 1 amino acid differences with the CDR3 sequence mentioned in Table B-1 that belongs to the same combination as the CDR2 sequence.

[0585] Some particularly preferred Nanobodies of the invention may for example comprise: (1) a CDR1 sequence that has more than 80% sequence identity with one of the CDR1 sequences mentioned in Table B-1; a CDR2 sequence that has 3, 2 or 1 amino acid difference with the CDR2 sequence mentioned in Table B-1 that belongs to the same combination; and a CDR3 sequence that has more than 80% sequence identity with the CDR3 sequence mentioned in Table B-1 that belongs to the same combination; (2) a CDR1 sequence; a CDR 2 listed in Table B-1 and a CDR3 sequence listed in Table B-1 (in which the CDR2 sequence and CDR3 sequence may belong to different combinations).

[0586] Some even more preferred Nanobodies of the invention may for example comprise: (1) a CDR1 sequence that has more than 80% sequence identity with one of the CDR1 sequences mentioned in Table B-1; the CDR2 sequence listed in Table B-1 that belongs to the same combination; and a CDR3 sequence mentioned in Table B-1 that belongs to a different combination; or (2) a CDR1 sequence mentioned in Table B-1; a CDR2 sequence that has 3, 2 or 1 amino acid differences with the CDR2 sequence mentioned in Table B-1 that belongs to the same combination; and a CDR3 sequence that has more than 80% sequence identity with the CDR3 sequence listed in Table B-1 that belongs to the same or a different combination.

[0587] Particularly preferred Nanobodies of the invention may for example comprise a CDR1 sequence mentioned in Table B-1, a CDR2 sequence that has more than 80% sequence identity with the CDR2 sequence mentioned in Table B-1 that belongs to the same combination; and the CDR3 sequence mentioned in Table B-1 that belongs to the same combination.

[0588] In the most preferred Nanobodies of the invention, the CDR1, CDR2 and CDR3 sequences present are suitably chosen from one of the combinations of CDR1, CDR2 and CDR3 sequences, respectively, listed in Table B-1.

[0589] According to another preferred, but non-limiting aspect of the invention (a) CDR1 has a length of between 1 and 12 amino acid residues, and usually between 2 and 9 amino acid residues, such as 5, 6 or 7 amino acid residues; and/or (b) CDR2 has a length of between 13 and 24 amino acid residues, and usually between 15 and 21 amino acid residues, such as 16 and 17 amino acid residues; and/or (c) CDR3 has a length of between 2 and 35 amino acid residues, and usually between 3 and 30 amino acid residues, such as between 6 and 23 amino acid residues.

[0590] In another preferred, but non-limiting aspect, the invention relates to a Nanobody in which the CDR sequences (as defined herein) have more than 80%, preferably more than 90%, more preferably more than 95%, such as 99% or more sequence identity (as defined herein) with the CDR sequences of at least one of the amino acid sequences of SEQ ID NO's: 12 to 26 (see Table A-1).

[0591] Generally, Nanobodies with the above CDR sequences may be as further described herein, and preferably have framework sequences that are also as further described herein.

[0592] For example, as already mentioned, the framework sequences present in the nanobodies may be as generally described on pages 258 to 297 of WO 09/068,627 (incorporated herein by reference). For example, they may contain one or more of the combinations of Hallmark residues set out in Table A-5 of WO 09/068,627; and FR1, FR2, FR3 and FR4 may contain the amino acid residues set out in Table A-6, Table A-7, Table A-8 and Table A-9 of WO 09/068,627, respectively. Also, when the ISV's of the invention are Nanobodies, they may belong to the KERE-group (see pages 281 to 284 of WO 09/068,627, with some representative FR1, FR2, FR3 and FR4 sequences for this group given in Tables A-11/A-15, A-12, A-13 and A-14 of WO 09/068,627); to the GLEW-group (see pages 285 to 287 of WO 09/068,627, with some representative FR1, FR2, FR3 and FR4 sequences for this group given in Tables A-16/A-20, A-17, A-18 and A-19 of WO 09/068,627); or to the P, R, S 103 group (see pages 287 to 291 of WO 09/068,627, with some representative FR1, FR2, FR3 and FR4 sequences for this group given in Tables A-21/A-25, A-22, A-23 and A-24 of WO 09/068,627), which are all as described in WO 09/068,627, with some representative sequences for each of these groups given in Table A-10 of WO 09/068,627. As also described in WO 09/068,627, these framework sequences may contain one or more suitable humanizing substitutions or (other) substitutions for optimizing the sequence (see also the further disclosure herein).

[0593] Again, some particularly preferred but non-limiting FR1, FR2, FR3 and FR4 sequences (and combinations thereof) are those described in Table B-1, or suitable variants of such FR1, FR2, FR3 and FR4 sequences, respectively (for example, with less than 5, such as 1, 2, 3, 4 or 5 suitable amino acid differences in such an FR1, FR2, FR3 or FR4 compared to a framework sequence mentioned in Table B-1, in which the amino acid differences may be as described in WO 09/068,627) that still essentially retain the desired properties of Nanobodies.

[0594] Thus, for example and as mentioned herein, such Nanobodies may be naturally occurring Nanobodies (from any suitable species), naturally occurring V_{HH} sequences (i.e. from a suitable species of Camelid) or synthetic or semi-synthetic amino acid sequences or Nanobodies, including but not limited to partially humanized Nanobodies or V_{HH} sequences, fully humanized Nanobodies or V_{HH} sequences, camelized heavy chain variable domain sequences, as well as Nanobodies that have been obtained by the techniques mentioned herein.

[0595] Thus, in one specific, but non-limiting aspect, the invention relates to a humanized Nanobody, which consists of 4 framework regions (FR1 to FR4 respectively) and 3 complementarity determining regions (CDR1 to CDR3 respectively), in which CDR1 to CDR3 are as defined herein and in which said humanized Nanobody comprises at least one humanizing substitution (as defined herein), and in particular at least one humanizing substitution in at least one of its framework sequences (as defined herein).

[0596] Also, in addition to humanizing substitutions as described herein, the ISV's and in particular nanobodies of the invention may contain one or more other/further substitutions. Again, some preferred, but non-limiting examples of such other/further substitutions will become clear from the further description herein, and for example may include (and preferably essentially consist of) one or more of the following substitutions:
[0597] (a) one or more conservative amino acid substitutions; and/or
[0598] (b) one or more substitutions in which a “camelid” amino acid residue at a certain position is replaced by a different “camelid” amino acid residue that occurs at said position, for which reference is for example made to Tables A-6 to A-9 from PCT/EP2008/066365 (published on Jun. 4, 2009 as WO 09/068,627), which mention the various Camelid residues that occur as each amino acid position in wild-type VHH's. Such substitutions may even comprise suitable substitutions of an amino acid residue that occurs at a Hallmark position with another amino acid residue that occurring at a Hallmark position in a wild-type VHH (for which reference is for example made to Tables A-6 to A-9 from PCT/EP2008/066365); and/or
[0599] (c) one or more substitutions that improve the (other) properties of the protein, such as substitutions that improve the long-term stability and/or properties under storage of the protein. These may for example and without limitation be substitutions that prevent or reduce oxidation events (for example, of methionine residues); that prevent or reduce pyroglutamate formation; and/or that prevent or reduce isomerisation or deamidation of aspartic acids or asparagines (for example, of DG, DS, NG or NS motifs). For such substitutions, reference is for example made to the International application WO 09/095,235, which is generally directed to methods for stabilizing single immunoglobulin variable domains by means of such substitutions, and also gives some specific example of suitable substitutions (see for example pages 4 and 5 and pages 10 to 15). One example of such substitution may be to replace an NS motif at positions 82a and 82b with an NN motif.

[0600] In another preferred, but non-limiting aspect, the invention relates to a Nanobody in which the CDR sequences have at least 70% amino acid identity, preferably at least 80% amino acid identity, more preferably at least 90% amino acid identity, such as 95% amino acid identity or more or even essentially 100% amino acid identity with the CDR sequences of at least one of the amino acid sequences of SEQ ID NO's: 12 to 26 (see Table A-1). This degree of amino acid identity can for example be determined by determining the degree of amino acid identity (in a manner described herein) between said Nanobody and one or more of the sequences of SEQ ID NO's: 12 to 26 (see Table A-1), in which the amino acid residues that form the framework regions are disregarded. Such Nanobodies can be as further described herein.

[0601] In another preferred, but non-limiting aspect, the invention relates to a Nanobody with an amino acid sequence that is chosen from the group consisting of SEQ ID NO's: 12 to 26 (see Table A-1) or from the group consisting of from amino acid sequences that have more than 80%, preferably more than 90%, more preferably more than 95%, such as 99% or more sequence identity (as defined herein) with at least one of the amino acid sequences of SEQ ID NO's: 12 to 26 (see Table A-1).

[0602] Another preferred, but non-limiting aspect of the invention relates to humanized variants of the Nanobodies of SEQ ID NO's: 12 to 26 (see Table A-1), that comprise, compared to the corresponding native V_{HH} sequence, at least one humanizing substitution (as defined herein), and in particular at least one humanizing substitution in at least one of its framework sequences (as defined herein).

[0603] The polypeptides of the invention comprise or essentially consist of at least one Nanobody of the invention. Some preferred, but non-limiting examples of polypeptides of the invention are given in SEQ ID NO's: 147 to 327, more preferably HER3MS00135 (SEQ ID NO:282), HER3MS00212 (SEQ ID NO:319) or HER3MS00215 (SEQ ID NO:322) (see Table A-2). It should be noted that some of the sequences listed in the Table below (SEQ ID NO's: 224-231, 241-281, 318 and SEQ ID NO's: 323-327) contain a C-terminal tag (e.g. a His-tag of 6H). In practice, these polypeptides may also be used (and for example for therapeutic purposes preferably are used) without the (C-terminal) tag, and the (C-terminal) tag should also be disregarded for the purposes of determining the degree of sequence identity to each of these sequences.

TABLE A-2
Preferred polypeptide or compound sequences
(also referred herein as a sequence with a particular
name or SEQ ID NO: X, wherein X is a number referring
to the relevant amino acid sequence):

| | SEQ ID | |
|---|---|---|
| | NO: X, | |
| | wherein | |
| Name | X = | Amino acid sequence |
| 17C8- | 147 | EVQLVESGGGLMQAGDSLRLSCAASGRAFSSYALGWFRRAPGKE |
| 35GS- | | REFVAATDRLGDNTYFPDSVKGRFTISRDNAKNTLYLQMNNLKPE |
| 17C8-9GS- | | DTAVYYCAAGAVRYGVSTSPMNYNYWGQGTLVTVSSGGGGSGG |
| ALB8 | | GGSGGGGSGGGGSGGGGSGGGGSGGGGSEVQLVESGGGLMQAG |
| | | DSLRLSCAASGRAFSSYALGWFRRAPGKEREFVAATDRLGDNTYF |
| | | PDSVKGRFTISRDNAKNTLYLQMNNLKPEDTAVYYCAAGAVRYG |
| | | VSTSPMNYNYWGQGTLVTVSSGGGGSGGGSEVQLVESGGGLVQP |
| | | GNSLRLSCAASGFTFSSFGMSWVRQAPGKGLEWVSSISGSGSDTL |
| | | YADSVKGRFTISRDNAKTTLYLQMNSLRPEDTAVYYCTIGGSLSR |
| | | SSQGTLVTVSS |
| 17C8- | 148 | EVQLVESGGGLMQAGDSLRLSCAASGRAFSSYALGWFRRAPGKE |
| 35GS- | | REFVAATDRLGDNTYFPDSVKGRFTISRDNAKNTLYLQMNNLKPE |
| 18F5-9GS- | | DTAVYYCAAGAVRYGVSTSPMNYNYWGQGTLVTVSSGGGGSGG |
| ALB8 | | GGSGGGGSGGGGSGGGGSGGGGSGGGGSEVQLVESGGGLVQPG |
| | | GSLRLSCVASGFTFSSYWMYWVRQAPGKGVEWVSAISPGGVERY |
| | | TDSVKGRFTISRDNAKNTLYLQMNSLKSEDTAMYYCARLTSFATP |
| | | ESQGTLVTVSSGGGGSGGGSEVQLVESGGGLVQPGNSLRLSCAAS |
| | | GFTFSSFGMSWVRQAPGKGLEWVSSISGSGSDTLYADSVKGRFTIS |
| | | RDNAKTTLYLQMNSLRPEDTAVYYCTIGGSLSRSSQGTLVTVSS |
| 17C8- | 149 | EVQLVESGGGLMQAGDSLRLSCAASGRAFSSYALGWFRRAPGKE |
| 35GS- | | REFVAATDRLGDNTYFPDSVKGRFTISRDNAKNTLYLQMNNLKPE |
| 21F06- | | DTAVYYCAAGAVRYGVSTSPMNYNYWGQGTLVTVSSGGGGSGG |
| 9GS-ALB8 | | GGSGGGGSGGGGSGGGGSGGGGSGGGGSEVQLVESGGGLVQAG |
| | | GSLRLSCAASGRTYYLNAMGWFRQGPGKDREFVAAIDWSDGNK |
| | | DYADSVKGRFTISRDNAKNTVYLQMNSLKPEDTAVYYCAADTPP |
| | | WGPMIYIESYDSWGQGTLVTVSSGGGGSGGGSEVQLVESGGGLV |
| | | QPGNSLRLSCAASGFTFSSFGMSWVRQAPGKGLEWVSSISGSGSD |
| | | TLYADSVKGRFTISRDNAKTTLYLQMNSLRPEDTAVYYCTIGGSL |
| | | SRSSQGTLVTVSS |
| 17C8- | 150 | EVQLVESGGGLMQAGDSLRLSCAASGRAFSSYALGWFRRAPGKE |
| 35GS-4C7- | | REFVAATDRLGDNTYFPDSVKGRFTISRDNAKNTLYLQMNNLKPE |
| 9GS-ALB8 | | DTAVYYCAAGAVRYGVSTSPMNYNYWGQGTLVTVSSGGGGSGG |
| | | GGSGGGGSGGGGSGGGGSGGGGSGGGGSEVQLVESGGGLVQAG |
| | | GSLRLSCAASGFTFSSYPMSWVRQAPGKGPAWVSTVSPGGITTSY |
| | | ADSVKGRFTISRDNAKNTLYLQMNSLKPEDTAVYYCLRDLNNRG |
| | | QGTLVTVSSGGGGSGGGSEVQLVESGGGLVQPGNSLRLSCAASGF |
| | | TFSSFGMSWVRQAPGKGLEWVSSISGSGSDTLYADSVKGRFTISR |
| | | DNAKTTLYLQMNSLRPEDTAVYYCTIGGSLSRSSQGTLVTVSS |
| 18F5- | 151 | EVQLVESGGGLVQPGGSLRLSCVASGFTFSSYWMYWVRQAPGKG |
| 35GS- | | VEWVSAISPGGVERYTDSVKGRFTISRDNAKNTLYLQMNSLKSED |
| 17C8-9GS- | | TAMYYCARLTSFATPESQGTLVTVSSGGGGSGGGGSGGGGSGGG |
| ALB8 | | GSGGGGSGGGGSGGGGSEVQLVESGGGLMQAGDSLRLSCAASGR |
| | | AFSSYALGWFRRAPGKEREFVAATDRLGDNTYFPDSVKGRFTISR |
| | | DNAKNTLYLQMNNLKPEDTAVYYCAAGAVRYGVSTSPMNYNY |
| | | WGQGTLVTVSSGGGGSGGGSEVQLVESGGGLVQPGNSLRLSCAA |
| | | SGFTFSSFGMSWVRQAPGKGLEWVSSISGSGSDTLYADSVKGRFTI |
| | | SRDNAKTTLYLQMNSLRPEDTAVYYCTIGGSLSRSSQGTLVTVSS |
| 18F5- | 152 | EVQLVESGGGLVQPGGSLRLSCVASGFTFSSYWMYWVRQAPGKG |
| 35GS- | | VEWVSAISPGGVERYTDSVKGRFTISRDNAKNTLYLQMNSLKSED |
| 18F5-9GS- | | TAMYYCARLTSFATPESQGTLVTVSSGGGGSGGGGSGGGGSGGG |
| ALB8 | | GSGGGGSGGGGSGGGGSEVQLVESGGGLVQPGGSLRLSCVASGF |
| | | TFSSYWMYWVRQAPGKGVEWVSAISPGGVERYTDSVKGRFTISR |
| | | DNAKNTLYLQMNSLKSEDTAMYYCARLTSFATPESQGTLVTVSS |
| | | GGGGSGGGSEVQLVESGGGLVQPGNSLRLSCAASGFTFSSFGMS |
| | | WVRQAPGKGLEWVSSISGSGSDTLYADSVKGRFTISRDNAKTTLY |
| | | LQMNSLRPEDTAVYYCTIGGSLSRSSQGTLVTVSS |
| 18F5- | 153 | EVQLVESGGGLVQPGGSLRLSCVASGFTFSSYWMYWVRQAPGKG |
| 35GS- | | VEWVSAISPGGVERYTDSVKGRFTISRDNAKNTLYLQMNSLKSED |
| 21F6-9GS- | | TAMYYCARLTSFATPESQGTLVTVSSGGGGSGGGGSGGGGSGGG |
| ALB8 | | GSGGGGSGGGGSGGGGSEVQLVESGGGLVQAGGSLRLSCAASGR |
| | | TYYLNAMGWFRQGPGKDREFVAAIDWSDGNKDYADSVKGRFTI |
| | | SRDNAKNTVYLQMNSLKPEDTAVYYCAADTPPWGPMIYIESYDS |
| | | WGQGTLVTVSSGGGGSGGGSEVQLVESGGGLVQPGNSLRLSCAA |
| | | SGFTFSSFGMSWVRQAPGKGLEWVSSISGSGSDTLYADSVKGRFTI |
| | | SRDNAKTTLYLQMNSLRPEDTAVYYCTIGGSLSRSSQGTLVTVSS |
| 18F5- | 154 | EVQLVESGGGLVQPGGSLRLSCVASGFTFSSYWMYWVRQAPGKG |
| 35GS- | | VEWVSAISPGGVERYTDSVKGRFTISRDNAKNTLYLQMNSLKSED |
| 34C7-9GS- | | TAMYYCARLTSFATPESQGTLVTVSSGGGGSGGGGSGGGGSGGG |
| ALB8 | | GSGGGGSGGGGSGGGGSEVQLVESGGGLVQPGGSLGLSCVASGSI |
| | | FRINAMAWYRQAPGKQRELVAEITAGGSTNYADSVKGRFTISVD |
| | | NAWNTLYLQMNSLKVEDTAVYYCNLDHYTTWDRRSAYWGQGT |
| | | LVTVSSGGGGSGGGSEVQLVESGGGLVQPGNSLRLSCAASGFTFS |
| | | SFGMSWVRQAPGKGLEWVSSISGSGSDTLYADSVKGRFTISRDNA |
| | | KTTLYLQMNSLRPEDTAVYYCTIGGSLSRSSQGTLVTVSS |
| 21F6- | 155 | EVQLVESGGGLVQAGGSLRLSCAASGRTYYLNAMGWFRQGPGK |
| 35GS- | | DREFVAAIDWSDGNKDYADSVKGRFTISRDNAKNTVYLQMNSLK |
| 17C8-9GS- | | PEDTAVYYCAADTPPWGPMIYIESYDSWGQGTLVTVSSGGGGSG |
| ALB8 | | GGGSGGGGSGGGGSGGGGSGGGGSGGGGSEVQLVESGGGLMQA |
| | | GDSLRLSCAASGRAFSSYALGWFRRAPGKEREFVAATDRLGDNT |
| | | YFPDSVKGRFTISRDNAKNTLYLQMNNLKPEDTAVYYCAAGAVR |
| | | YGVSTSPMNYNYWGQGTLVTVSSGGGGSGGGSEVQLVESGGGL |
| | | VQPGNSLRLSCAASGFTFSSFGMSWVRQAPGKGLEWVSSISGSGS |
| | | DTLYADSVKGRFTISRDNAKTTLYLQMNSLRPEDTAVYYCTIGGS |
| | | LSRSSQGTLVTVSS |
| 21F6- | 156 | EVQLVESGGGLVQAGGSLRLSCAASGRTYYLNAMGWFRQGPGK |
| 35GS- | | DREFVAAIDWSDGNKDYADSVKGRFTISRDNAKNTVYLQMNSLK |
| 18F5-9GS- | | PEDTAVYYCAADTPPWGPMIYIESYDSWGQGTLVTVSSGGGGSG |
| ALB8 | | GGGSGGGGSGGGGSGGGGSGGGGSGGGGSEVQLVESGGGLVQP |
| | | GGSLRLSCVASGFTFSSYWMYWVRQAPGKGVEWVSAISPGGVER |
| | | YTDSVKGRFTISRDNAKNTLYLQMNSLKSEDTAMYYCARLTSFA |
| | | TPESQGTLVTVSSGGGGSGGGSEVQLVESGGGLVQPGNSLRLSCA |
| | | ASGFTFSSFGMSWVRQAPGKGLEWVSSISGSGSDTLYADSVKGRF |
| | | TISRDNAKTTLYLQMNSLRPEDTAVYYCTIGGSLSRSSQGTLVTVSS |
| 21F6- | 157 | EVQLVESGGGLVQAGGSLRLSCAASGRTYYLNAMGWFRQGPGK |
| 35GS- | | DREFVAAIDWSDGNKDYADSVKGRFTISRDNAKNTVYLQMNSLK |
| 21F6-9GS- | | PEDTAVYYCAADTPPWGPMIYIESYDSWGQGTLVTVSSGGGGSG |
| ALB8 | | GGGSGGGGSGGGGSGGGGSGGGGSGGGGSEVQLVESGGGLVQA |
| | | GGSLRLSCAASGRTYYLNAMGWFRQGPGKDREFVAAIDWSDGN |
| | | KDYADSVKGRFTISRDNAKNTVYLQMNSLKPEDTAVYYCAADTP |
| | | PWGPMIYIESYDSWGQGTLVTVSSGGGGSGGGSEVQLVESGGGL |
| | | VQPGNSLRLSCAASGFTFSSFGMSWVRQAPGKGLEWVSSISGSGS |
| | | DTLYADSVKGRFTISRDNAKTTLYLQMNSLRPEDTAVYYCTIGGS |
| | | LSRSSQGTLVTVSS |
| 21F6- | 158 | EVQLVESGGGLVQAGGSLRLSCAASGRTYYLNAMGWFRQGPGK |
| 35GS- | | DREFVAAIDWSDGNKDYADSVKGRFTISRDNAKNTVYLQMNSLK |
| 34C7-9GS- | | PEDTAVYYCAADTPPWGPMIYIESYDSWGQGTLVTVSSGGGGSG |
| ALB8 | | GGGSGGGGSGGGGSGGGGSGGGGSGGGGSEVQLVESGGGLVQP |
| | | GGSLGLSCVASGSIFRINAMAWYRQAPGKQRELVAEITAGGSTNY |
| | | ADSVKGRFTISVDNAWNTLYLQMNSLKVEDTAVYYCNLDHYTT |
| | | WDRRSAYWGQGTLVTVSSGGGGSGGGSEVQLVESGGGLVQPGN |
| | | SLRLSCAASGFTFSSFGMSWVRQAPGKGLEWVSSISGSGSDTLYA |
| | | DSVKGRFTISRDNAKTTLYLQMNSLRPEDTAVYYCTIGGSLSRSSQ |
| | | GTLVTVSS |
| 21F6- | 159 | EVQLVESGGGLVQAGGSLRLSCAASGRTYYLNAMGWFRQGPGK |
| 35GS-4C7- | | DREFVAAIDWSDGNKDYADSVKGRFTISRDNAKNTVYLQMNSLK |
| 9GS-ALB8 | | PEDTAVYYCAADTPPWGPMIYIESYDSWGQGTLVTVSSGGGGSG |
| | | GGGSGGGGSGGGGSGGGGSGGGGSGGGGSEVQLVESGGGLVQA |
| | | GGSLRLSCAASGFTFSSYPMSWVRQAPGKGPAWVSTVSPGGITTS |
| | | YADSVKGRFTISRDNAKNTLYLQMNSLKPEDTAVYYCLRDLNNR |
| | | GQGTLVTVSSGGGGSGGGSEVQLVESGGGLVQPGNSLRLSCAAS |
| | | GFTFSSFGMSWVRQAPGKGLEWVSSISGSGSDTLYADSVKGRFTIS |
| | | RDNAKTTLYLQMNSLRPEDTAVYYCTIGGSLSRSSQGTLVTVSS |
| 34C7- | 160 | EVQLVESGGGLVQPGGSLGLSCVASGSIFRINAMAWYRQAPGKQ |
| 35GS- | | RELVAEITAGGSTNYADSVKGRFTISVDNAWNTLYLQMNSLKVE |
| 18F5-9GS- | | DTAVYYCNLDHYTTWDRRSAYWGQGTLVTVSSGGGGSGGGGSG |
| ALB8 | | GGGSGGGGSGGGGSGGGGSGGGGSEVQLVESGGGLVQPGGSLRL |
| | | SCVASGFTFSSYWMYWVRQAPGKGVEWVSAISPGGVERYTDSVK |
| | | GRFTISRDNAKNTLYLQMNSLKSEDTAMYYCARLTSFATPESQGT |
| | | LVTVSSGGGGSGGGSEVQLVESGGGLVQPGNSLRLSCAASGFTFS |
| | | SFGMSWVRQAPGKGLEWVSSISGSGSDTLYADSVKGRFTISRDNA |
| | | KTTLYLQMNSLRPEDTAVYYCTIGGSLSRSSQGTLVTVSS |
| 34C7- | 161 | EVQLVESGGGLVQPGGSLGLSCVASGSIFRINAMAWYRQAPGKQ |
| 35GS- | | RELVAEITAGGSTNYADSVKGRFTISVDNAWNTLYLQMNSLKVE |
| 21F6-9GS- | | DTAVYYCNLDHYTTWDRRSAYWGQGTLVTVSSGGGGSGGGGSG |
| ALB8 | | GGGSGGGGSGGGGSGGGGSGGGGSEVQLVESGGGLVQAGGSLR |
| | | LSCAASGRTYYLNAMGWFRQGPGKDREFVAAIDWSDGNKDYAD |
| | | SVKGRFTISRDNAKNTVYLQMNSLKPEDTAVYYCAADTPPWGPM |
| | | IYIESYDSWGQGTLVTVSSGGGGSGGGSEVQLVESGGGLVQPGNS |
| | | LRLSCAASGFTFSSFGMSWVRQAPGKGLEWVSSISGSGSDTLYAD |
| | | SVKGRFTISRDNAKTTLYLQMNSLRPEDTAVYYCTIGGSLSRSSQG |
| | | TLVTVSS |
| 34C7- | 162 | EVQLVESGGGLVQPGGSLGLSCVASGSIFRINAMAWYRQAPGKQ |
| 35GS- | | RELVAEITAGGSTNYADSVKGRFTISVDNAWNTLYLQMNSLKVE |
| 34C7-9GS- | | DTAVYYCNLDHYTTWDRRSAYWGQGTLVTVSSGGGGSGGGGSG |
| ALB8 | | GGGSGGGGSGGGGSGGGGSGGGGSEVQLVESGGGLVQPGGSLGL |
| | | SCVASGSIFRINAMAWYRQAPGKQRELVAEITAGGSTNYADSVKG |
| | | RFTISVDNAWNTLYLQMNSLKVEDTAVYYCNLDHYTTWDRRSA |
| | | YWGQGTLVTVSSGGGGSGGGSEVQLVESGGGLVQPGNSLRLSCA |
| | | ASGFTFSSFGMSWVRQAPGKGLEWVSSISGSGSDTLYADSVKGRF |
| | | TISRDNAKTTLYLQMNSLRPEDTAVYYCTIGGSLSRSSQGTLVTVSS |
| 34C7- | 163 | EVQLVESGGGLVQPGGSLGLSCVASGSIFRINAMAWYRQAPGKQ |
| 35GS-4C7- | | RELVAEITAGGSTNYADSVKGRFTISVDNAWNTLYLQMNSLKVE |
| 9GS-ALB8 | | DTAVYYCNLDHYTTWDRRSAYWGQGTLVTVSSGGGGSGGGGSG |
| | | GGGSGGGGSGGGGSGGGGSGGGGSEVQLVESGGGLVQAGGSLR |
| | | LSCAASGFTFSSYPMSWVRQAPGKGPAWVSTVSPGGITTSYADSV |
| | | KGRFTISRDNAKNTLYLQMNSLKPEDTAVYYCLRDLNNRGQGTL |
| | | VTVSSGGGGSGGGSEVQLVESGGGLVQPGNSLRLSCAASGFTFSS |
| | | FGMSWVRQAPGKGLEWVSSISGSGSDTLYADSVKGRFTISRDNAK |
| | | TTLYLQMNSLRPEDTAVYYCTIGGSLSRSSQGTLVTVSS |
| 4C7-35GS- | 164 | EVQLVESGGGLVQAGGSLRLSCAASGFTFSSYPMSWVRQAPGKG |
| 17C8-9GS- | | PAWVSTVSPGGITTSYADSVKGRFTISRDNAKNTLYLQMNSLKPE |
| ALB8 | | DTAVYYCLRDLNNRGQGTLVTVSSGGGGSGGGGSGGGGSGGGG |
| | | SGGGGSGGGGSGGGGSEVQLVESGGGLMQAGDSLRLSCAASGRA |
| | | FSSYALGWFRRAPGKEREFVAATDRLGDNTYFPDSVKGRFTISRD |
| | | NAKNTLYLQMNNLKPEDTAVYYCAAGAVRYGVSTSPMNYNYW |
| | | GQGTLVTVSSGGGGSGGGSEVQLVESGGGLVQPGNSLRLSCAAS |
| | | GFTFSSFGMSWVRQAPGKGLEWVSSISGSGSDTLYADSVKGRFTIS |
| | | RDNAKTTLYLQMNSLRPEDTAVYYCTIGGSLSRSSQGTLVTVSS |
| 4C7-35GS- | 165 | EVQLVESGGGLVQAGGSLRLSCAASGFTFSSYPMSWVRQAPGKG |
| 21F6-9GS- | | PAWVSTVSPGGITTSYADSVKGRFTISRDNAKNTLYLQMNSLKPE |
| ALB8 | | DTAVYYCLRDLNNRGQGTLVTVSSGGGGSGGGGSGGGGSGGGG |
| | | SGGGGSGGGGSGGGGSEVQLVESGGGLVQAGGSLRLSCAASGRT |
| | | YYLNAMGWFRQGPGKDREFVAAIDWSDGNKDYADSVKGRFTIS |
| | | RDNAKNTVYLQMNSLKPEDTAVYYCAADTPPWGPMIYIESYDSW |
| | | GQGTLVTVSSGGGGSGGGSEVQLVESGGGLVQPGNSLRLSCAAS |
| | | GFTFSSFGMSWVRQAPGKGLEWVSSISGSGSDTLYADSVKGRFTIS |
| | | RDNAKTTLYLQMNSLRPEDTAVYYCTIGGSLSRSSQGTLVTVSS |
| 4C7-35GS- | 166 | EVQLVESGGGLVQAGGSLRLSCAASGFTFSSYPMSWVRQAPGKG |
| 34C7-9GS- | | PAWVSTVSPGGITTSYADSVKGRFTISRDNAKNTLYLQMNSLKPE |
| ALB8 | | DTAVYYCLRDLNNRGQGTLVTVSSGGGGSGGGGSGGGGSGGGG |
| | | SGGGGSGGGGSGGGGSEVQLVESGGGLVQPGGSLGLSCVASGSIF |
| | | RINAMAWYRQAPGKQRELVAEITAGGSTNYADSVKGRFTISVDN |
| | | AWNTLYLQMNSLKVEDTAVYYCNLDHYTTWDRRSAYWGQGTL |
| | | VTVSSGGGGSGGGSEVQLVESGGGLVQPGNSLRLSCAASGFTFSS |
| | | FGMSWVRQAPGKGLEWVSSISGSGSDTLYADSVKGRFTISRDNAK |
| | | TTLYLQMNSLRPEDTAVYYCTIGGSLSRSSQGTLVTVSS |
| 4C7-35GS- | 167 | EVQLVESGGGLVQAGGSLRLSCAASGFTFSSYPMSWVRQAPGKG |
| 4C7-9GS- | | PAWVSTVSPGGITTSYADSVKGRFTISRDNAKNTLYLQMNSLKPE |
| ALB8 | | DTAVYYCLRDLNNRGQGTLVTVSSGGGGSGGGGSGGGGSGGGG |
| | | SGGGGSGGGGSGGGGSEVQLVESGGGLVQAGGSLRLSCAASGFT |
| | | FSSYPMSWVRQAPGKGPAWVSTVSPGGITTSYADSVKGRFTISRD |
| | | NAKNTLYLQMNSLKPEDTAVYYCLRDLNNRGQGTLVTVSSGGG |
| | | GSGGGSEVQLVESGGGLVQPGNSLRLSCAASGFTFSSFGMSWVRQ |
| | | APGKGLEWVSSISGSGSDTLYADSVKGRFTISRDNAKTTLYLQMN |
| | | SLRPEDTAVYYCTIGGSLSRSSQGTLVTVSS |
| 18F5- | 168 | EVQLVESGGGLVQPGGSLRLSCVASGFTFSSYWMYWVRQAPGKG |
| 35GS- | | VEWVSAISPGGVERYTDSVKGRFTISRDNAKNTLYLQMNSLKSED |
| 18G11- | | TAMYYCARLTSFATPESQGTLVTVSSGGGGSGGGGSGGGGSGGG |
| 9GS-ALB8 | | GSGGGGSGGGGSGGGGSEVQLVESGGGLVQPGGSLRLSCAASGT |
| | | LFKINAMGWYRQAPGKRRELVALITSSDTTDYAESVEGRFTISRD |
| | | NTWNAVYLQMNSLKPEDTAVYYCHSDHYSMGVPEKRVIMYGQG |
| | | TLVTVSSGGGGSGGGSEVQLVESGGGLVQPGNSLRLSCAASGFTF |
| | | SSFGMSWVRQAPGKGLEWVSSISGSGSDTLYADSVKGRFTISRDN |
| | | AKTTLYLQMNSLRPEDTAVYYCTIGGSLSRSSQGTLVTVSS |
| 21F6- | 169 | EVQLVESGGGLVQAGGSLRLSCAASGRTYYLNAMGWFRQGPGK |
| 35GS- | | DREFVAAIDWSDGNKDYADSVKGRFTISRDNAKNTVYLQMNSLK |
| 18G11- | | PEDTAVYYCAADTPPWGPMIYIESYDSWGQGTLVTVSSGGGGSG |
| 9GS-ALB8 | | GGGSGGGGSGGGGSGGGGSGGGGSGGGGSEVQLVESGGGLVQP |
| | | GGSLRLSCAASGTLFKINAMGWYRQAPGKRRELVALITSSDTTDY |
| | | AESVEGRFTISRDNTWNAVYLQMNSLKPEDTAVYYCHSDHYSMG |
| | | VPEKRVIMYGQGTLVTVSSGGGGSGGGSEVQLVESGGGLVQPGN |
| | | SLRLSCAASGFTFSSFGMSWVRQAPGKGLEWVSSISGSGSDTLYA |
| | | DSVKGRFTISRDNAKTTLYLQMNSLRPEDTAVYYCTIGGSLSRSSQ |
| | | GTLVTVSS |
| 4C7-35GS- | 170 | EVQLVESGGGLVQAGGSLRLSCAASGFTFSSYPMSWVRQAPGKG |
| 18G11- | | PAWVSTVSPGGITTSYADSVKGRFTISRDNAKNTLYLQMNSLKPE |
| 9GS-ALB8 | | DTAVYYCLRDLNNRGQGTLVTVSSGGGGSGGGGSGGGGSGGGG |
| | | SGGGGSGGGGSGGGGSEVQLVESGGGLVQPGGSLRLSCAASGTL |
| | | FKINAMGWYRQAPGKRRELVALITSSDTTDYAESVEGRFTISRDN |
| | | TWNAVYLQMNSLKPEDTAVYYCHSDHYSMGVPEKRVIMYGQGT |
| | | LVTVSSGGGGSGGGSEVQLVESGGGLVQPGNSLRLSCAASGFTFS |
| | | SFGMSWVRQAPGKGLEWVSSISGSGSDTLYADSVKGRFTISRDNA |
| | | KTTLYLQMNSLRPEDTAVYYCTIGGSLSRSSQGTLVTVSS |
| 18G11- | 171 | EVQLVESGGGLVQPGGSLRLSCAASGTLFKINAMGWYRQAPGKR |
| 35GS- | | RELVALITSSDTTDYAESVEGRFTISRDNTWNAVYLQMNSLKPED |
| 18F5-9GS- | | TAVYYCHSDHYSMGVPEKRVIMYGQGTLVTVSSGGGGSGGGGS |
| ALB8 | | GGGGSGGGGSGGGGSGGGGSGGGGSEVQLVESGGGLVQPGGSL |
| | | RLSCVASGFTFSSYWMYWVRQAPGKGVEWVSAISPGGVERYTDS |
| | | VKGRFTISRDNAKNTLYLQMNSLKSEDTAMYYCARLTSFATPESQ |
| | | GTLVTVSSGGGGSGGGSEVQLVESGGGLVQPGNSLRLSCAASGFT |
| | | FSSFGMSWVRQAPGKGLEWVSSISGSGSDTLYADSVKGRFTISRD |
| | | NAKTTLYLQMNSLRPEDTAVYYCTIGGSLSRSSQGTLVTVSS |
| 18G11- | 172 | EVQLVESGGGLVQPGGSLRLSCAASGTLFKINAMGWYRQAPGKR |
| 35GS- | | RELVALITSSDTTDYAESVEGRFTISRDNTWNAVYLQMNSLKPED |
| 18G11- | | TAVYYCHSDHYSMGVPEKRVIMYGQGTLVTVSSGGGGSGGGGS |
| 9GS-ALB8 | | GGGGSGGGGSGGGGSGGGGSGGGGSEVQLVESGGGLVQPGGSL |
| | | RLSCAASGTLFKINAMGWYRQAPGKRRELVALITSSDTTDYAESV |
| | | EGRFTISRDNTWNAVYLQMNSLKPEDTAVYYCHSDHYSMGVPEK |
| | | RVIMYGQGTLVTVSSGGGGSGGGSEVQLVESGGGLVQPGNSLRL |
| | | SCAASGFTFSSFGMSWVRQAPGKGLEWVSSISGSGSDTLYADSVK |
| | | GRFTISRDNAKTTLYLQMNSLRPEDTAVYYCTIGGSLSRSSQGTLV |
| | | TVSS |
| 18G11- | 173 | EVQLVESGGGLVQPGGSLRLSCAASGTLFKINAMGWYRQAPGKR |
| 35GS- | | RELVALITSSDTTDYAESVEGRFTISRDNTWNAVYLQMNSLKPED |
| 21F6-9GS- | | TAVYYCHSDHYSMGVPEKRVIMYGQGTLVTVSSGGGGSGGGGS |
| ALB8 | | GGGGSGGGGSGGGGSGGGGSGGGGSEVQLVESGGGLVQAGGSL |
| | | RLSCAASGRTYYLNAMGWFRQGPGKDREFVAAIDWSDGNKDYA |
| | | DSVKGRFTISRDNAKNTVYLQMNSLKPEDTAVYYCAADTPPWGP |
| | | MIYIESYDSWGQGTLVTVSSGGGGSGGGSEVQLVESGGGLVQPG |
| | | NSLRLSCAASGFTFSSFGMSWVRQAPGKGLEWVSSISGSGSDTLY |
| | | ADSVKGRFTISRDNAKTTLYLQMNSLRPEDTAVYYCTIGGSLSRSS |
| | | QGTLVTVSS |
| 18G11- | 174 | EVQLVESGGGLVQPGGSLRLSCAASGTLFKINAMGWYRQAPGKR |
| 35GS-4C7- | | RELVALITSSDTTDYAESVEGRFTISRDNTWNAVYLQMNSLKPED |
| 9GS-ALB8 | | TAVYYCHSDHYSMGVPEKRVIMYGQGTLVTVSSGGGGSGGGGS |
| | | GGGGSGGGGSGGGGSGGGGSGGGGSEVQLVESGGGLVQAGGSL |
| | | RLSCAASGFTFSSYPMSWVRQAPGKGPAWVSTVSPGGITTSYADS |
| | | VKGRFTISRDNAKNTLYLQMNSLKPEDTAVYYCLRDLNNRGQGT |
| | | LVTVSSGGGGSGGGSEVQLVESGGGLVQPGNSLRLSCAASGFTFS |
| | | SFGMSWVRQAPGKGLEWVSSISGSGSDTLYADSVKGRFTISRDNA |
| | | KTTLYLQMNSLRPEDTAVYYCTIGGSLSRSSQGTLVTVSS |
| 18F05- | 175 | EVQLVESGGGLVQPGGSLRLSCVASGFTFSSYWMYWVRQAPGKG |
| 35GS- | | VEWVSAISPGGVERYTDSVKGRFTISRDNAKNTLYLQMNSLKSED |
| 4C07-9GS- | | TAMYYCARLTSFATPESQGTLVTVSSGGGGSGGGGSGGGGSGGG |
| ALB8 | | GSGGGGSGGGGSGGGGSEVQLVESGGGLVQAGGSLRLSCAASGF |
| | | TFSSYPMSWVRQAPGKGPAWVSTVSPGGITTSYADSVKGRFTISR |
| | | DNAKNTLYLQMNSLKPEDTAVYYCLRDLNNRGQGTQVTVSSGG |
| | | GGSGGGSEVQLVESGGGLVQPGNSLRLSCAASGFTFSSFGMSWVR |
| | | QAPGKGLEWVSSISGSGSDTLYADSVKGRFTISRDNAKTTLYLQM |
| | | NSLRPEDTAVYYCTIGGSLSRSSQGTLVTVSS |
| 18F05- | 176 | EVQLVESGGGLVQPGGSLRLSCVASGFTFSSYWMYWVRQAPGKG |
| 35GS- | | VEWVSAISPGGVERYTDSVKGRFTISRDNAKNTLYLQMNSLKSED |
| 17B05- | | TAMYYCARLTSFATPESQGTLVTVSSGGGGSGGGGSGGGGSGGG |
| 9GS-ALB8 | | GSGGGGSGGGGSGGGGSEVQLVESGGGLVQPGGSLRLSCAASGSI |
| | | GGLNAMAWYRQAPGKERELVAGIFGVGSTRYADSVKGRFTISRDI |
| | | AKNTVFLQMNSLNSEDTAVYYCRMSSVTRGSSDYWGQGTQVTV |
| | | SSGGGGSGGGSEVQLVESGGGLVQPGNSLRLSCAASGFTFSSFGM |
| | | SWVRQAPGKGLEWVSSISGSGSDTLYADSVKGRFTISRDNAKTTL |
| | | YLQMNSLRPEDTAVYYCTIGGSLSRSSQGTLVTVSS |
| 18F05- | 177 | EVQLVESGGGLVQPGGSLRLSCVASGFTFSSYWMYWVRQAPGKG |
| 35GS- | | VEWVSAISPGGVERYTDSVKGRFTISRDNAKNTLYLQMNSLKSED |
| 17E08- | | TAMYYCARLTSFATPESQGTLVTVSSGGGGSGGGGSGGGGSGGG |
| 9GS-ALB8 | | GSGGGGSGGGGSGGGGSEVQLVESGGGLVQPGGSLRLSCSASGSI |
| | | FGLNAMGWYRQTPGKERELVAGITSITRVGSTRYADSAKGRFTIS |
| | | GDYAKNTVYLQMNSLKPEDTGVYYCRMSIVKSGGADYWGQGTQ |
| | | VTVSSGGGGSGGGSEVQLVESGGGLVQPGNSLRLSCAASGFTFSS |
| | | FGMSWVRQAPGKGLEWVSSISGSGSDTLYADSVKGRFTISRDNAK |
| | | TTLYLQMNSLRPEDTAVYYCTIGGSLSRSSQGTLVTVSS |
| 17C08- | 178 | EVQLVESGGGLMQAGDSLRLSCAASGRAFSSYALGWFRRAPGKE |
| 35GS- | | RECVAATDRLGDNTYFPDSVKGRFTISRDNAKNTLYLQMNNLKP |
| 18G11- | | EDTAVYYCAAGAVRYGVSTSPMNYNYWGQGTQVTVSSGGGGSG |
| 9GS-ALB8 | | GGGSGGGGSGGGGSGGGGSGGGGSGGGGSEVQLVESGGGLVQP |
| | | GGSLRLSCAASGTLFKINAMGWYRQAPGKRRELVALITSSDTTDY |
| | | AESVEGRFTISRDNTWNAVYLQMNSLKPEDTAVYYCHSDHYSMG |
| | | VPEKRVIMYGQGTQVTVSSGGGGSGGGSEVQLVESGGGLVQPGN |
| | | SLRLSCAASGFTFSSFGMSWVRQAPGKGLEWVSSISGSGSDTLYA |
| | | DSVKGRFTISRDNAKTTLYLQMNSLRPEDTAVYYCTIGGSLSRSSQ |
| | | GTLVTVSS |
| 17C08- | 179 | EVQLVESGGGLMQAGDSLRLSCAASGRAFSSYALGWFRRAPGKE |
| 35GS- | | RECVAATDRLGDNTYFPDSVKGRFTISRDNAKNTLYLQMNNLKP |
| 34C07- | | EDTAVYYCAAGAVRYGVSTSPMNYNYWGQGTQVTVSSGGGGSG |
| 9GS-ALB8 | | GGGSGGGGSGGGGSGGGGSGGGGSGGGGSEVQLVESGGGLVQP |
| | | GGSLGLSCVASGSIFRINAMAWYRQAPGKQRELVAEITAGGSTNY |
| | | ADSVKGRFTISVDNAWNTLYLQMNSLKVEDTAVYYCNLDHYTT |
| | | WDRRSAYWGQGTQVTVSSGGGGSGGGSEVQLVESGGGLVQPGN |
| | | SLRLSCAASGFTFSSFGMSWVRQAPGKGLEWVSSISGSGSDTLYA |
| | | DSVKGRFTISRDNAKTTLYLQMNSLRPEDTAVYYCTIGGSLSRSSQ |
| | | GTLVTVSS |
| 17C08- | 180 | EVQLVESGGGLMQAGDSLRLSCAASGRAFSSYALGWFRRAPGKE |
| 35GS- | | RECVAATDRLGDNTYFPDSVKGRFTISRDNAKNTLYLQMNNLKP |
| 17B05- | | EDTAVYYCAAGAVRYGVSTSPMNYNYWGQGTQVTVSSGGGGSG |
| 9GS-ALB8 | | GGGSGGGGSGGGGSGGGGSGGGGSGGGGSEVQLVESGGGLVQP |
| | | GGSLRLSCAASGSIGGLNAMAWYRQAPGKERELVAGIFGVGSTR |
| | | YADSVKGRFTISRDIAKNTVFLQMNSLNSEDTAVYYCRMSSVTRG |
| | | SSDYWGQGTQVTVSSGGGGSGGGSEVQLVESGGGLVQPGNSLRL |
| | | SCAASGFTFSSFGMSWVRQAPGKGLEWVSSISGSGSDTLYADSVK |
| | | GRFTISRDNAKTTLYLQMNSLRPEDTAVYYCTIGGSLSRSSQGTLV |
| | | TVSS |
| 17C08- | 181 | EVQLVESGGGLMQAGDSLRLSCAASGRAFSSYALGWFRRAPGKE |
| 35GS- | | RECVAATDRLGDNTYFPDSVKGRFTISRDNAKNTLYLQMNNLKP |
| 17E08- | | EDTAVYYCAAGAVRYGVSTSPMNYNYWGQGTQVTVSSGGGGSG |
| 9GS-ALB8 | | GGGSGGGGSGGGGSGGGGSGGGGSGGGGSEVQLVESGGGLVQP |
| | | GGSLRLSCSASGSIFGLNAMGWYRQTPGKERELVAGITSITRVGST |
| | | RYADSAKGRFTISGDYAKNTVYLQMNSLKPEDTGVYYCRMSIVK |
| | | SGGADYWGQGTQVTVSSGGGGSGGGSEVQLVESGGGLVQPGNS |
| | | LRLSCAASGFTFSSFGMSWVRQAPGKGLEWVSSISGSGSDTLYAD |
| | | SVKGRFTISRDNAKTTLYLQMNSLRPEDTAVYYCTIGGSLSRSSQG |
| | | TLVTVSS |
| 4C07- | 182 | EVQLVESGGGLVQAGGSLRLSCAASGFTFSSYPMSWVRQAPGKG |
| 35GS- | | PAWVSTVSPGGITTSYADSVKGRFTISRDNAKNTLYLQMNSLKPE |
| 18F05- | | DTAVYYCLRDLNNRGQGTQVTVSSGGGGSGGGGSGGGGSGGGG |
| 9GS-ALB8 | | SGGGGSGGGGSGGGGSEVQLVESGGGLVQPGGSLRLSCVASGFTF |
| | | SSYWMYWVRQAPGKGVEWVSAISPGGVERYTDSVKGRFTISRDN |
| | | AKNTLYLQMNSLKSEDTAMYYCARLTSFATPESQGTQVTVSSGG |
| | | GGSGGGSEVQLVESGGGLVQPGNSLRLSCAASGFTFSSFGMSWVR |
| | | QAPGKGLEWVSSISGSGSDTLYADSVKGRFTISRDNAKTTLYLQM |
| | | NSLRPEDTAVYYCTIGGSLSRSSQGTLVTVSS |
| 4C07- | 183 | EVQLVESGGGLVQAGGSLRLSCAASGFTFSSYPMSWVRQAPGKG |
| 35GS- | | PAWVSTVSPGGITTSYADSVKGRFTISRDNAKNTLYLQMNSLKPE |
| 17B05- | | DTAVYYCLRDLNNRGQGTQVTVSSGGGGSGGGGSGGGGSGGGG |
| 9GS-ALB8 | | SGGGGSGGGGSGGGGSEVQLVESGGGLVQPGGSLRLSCAASGSIG |
| | | GLNAMAWYRQAPGKERELVAGIFGVGSTRYADSVKGRFTISRDIA |
| | | KNTVFLQMNSLNSEDTAVYYCRMSSVTRGSSDYWGQGTQVTVSS |
| | | GGGGSGGGSEVQLVESGGGLVQPGNSLRLSCAASGFTFSSFGMS |
| | | WVRQAPGKGLEWVSSISGSGSDTLYADSVKGRFTISRDNAKTTLY |
| | | LQMNSLRPEDTAVYYCTIGGSLSRSSQGTLVTVSS |
| 4C07- | 184 | EVQLVESGGGLVQAGGSLRLSCAASGFTFSSYPMSWVRQAPGKG |
| 35GS- | | PAWVSTVSPGGITTSYADSVKGRFTISRDNAKNTLYLQMNSLKPE |
| 17E08- | | DTAVYYCLRDLNNRGQGTQVTVSSGGGGSGGGGSGGGGSGGGG |
| 9GS-ALB8 | | SGGGGSGGGGSGGGGSEVQLVESGGGLVQPGGSLRLSCSASGSIF |
| | | GLNAMGWYRQTPGKERELVAGITSITRVGSTRYADSAKGRFTISG |
| | | DYAKNTVYLQMNSLKPEDTGVYYCRMSIVKSGGADYWGQGTQV |
| | | TVSSGGGGSGGGSEVQLVESGGGLVQPGNSLRLSCAASGFTFSSF |
| | | GMSWVRQAPGKGLEWVSSISGSGSDTLYADSVKGRFTISRDNAK |
| | | TTLYLQMNSLRPEDTAVYYCTIGGSLSRSSQGTLVTVSS |
| 18G11- | 185 | EVQLVESGGGLVQPGGSLRLSCAASGTLFKINAMGWYRQAPGKR |
| 35GS- | | RELVALITSSDTTDYAESVEGRFTISRDNTWNAVYLQMNSLKPED |
| 17C08- | | TAVYYCHSDHYSMGVPEKRVIMYGQGTQVTVSSGGGGSGGGGS |
| 9GS-ALB8 | | GGGGSGGGGSGGGGSGGGGSGGGGSEVQLVESGGGLMQAGDSL |
| | | RLSCAASGRAFSSYALGWFRRAPGKERECVAATDRLGDNTYFPD |
| | | SVKGRFTISRDNAKNTLYLQMNNLKPEDTAVYYCAAGAVRYGVS |
| | | TSPMNYNYWGQGTQVTVSSGGGGSGGGSEVQLVESGGGLVQPG |
| | | NSLRLSCAASGFTFSSFGMSWVRQAPGKGLEWVSSISGSGSDTLY |
| | | ADSVKGRFTISRDNAKTTLYLQMNSLRPEDTAVYYCTIGGSLSRSS |
| | | QGTLVTVSS |
| 18G11- | 186 | EVQLVESGGGLVQPGGSLRLSCAASGTLFKINAMGWYRQAPGKR |
| 35GS- | | RELVALITSSDTTDYAESVEGRFTISRDNTWNAVYLQMNSLKPED |
| 34C07- | | TAVYYCHSDHYSMGVPEKRVIMYGQGTQVTVSSGGGGSGGGGS |
| 9GS-ALB8 | | GGGGSGGGGSGGGGSGGGGSGGGGSEVQLVESGGGLVQPGGSL |
| | | GLSCVASGSIFRINAMAWYRQAPGKQRELVAEITAGGSTNYADSV |
| | | KGRFTISVDNAWNTLYLQMNSLKVEDTAVYYCNLDHYTTWDRR |
| | | SAYWGQGTQVTVSSGGGGSGGGSEVQLVESGGGLVQPGNSLRLS |
| | | CAASGFTFSSFGMSWVRQAPGKGLEWVSSISGSGSDTLYADSVKG |
| | | RFTISRDNAKTTLYLQMNSLRPEDTAVYYCTIGGSLSRSSQGTLVT |
| | | VSS |
| 18G11- | 187 | EVQLVESGGGLVQPGGSLRLSCAASGTLFKINAMGWYRQAPGKR |
| 35GS- | | RELVALITSSDTTDYAESVEGRFTISRDNTWNAVYLQMNSLKPED |
| 17B05- | | TAVYYCHSDHYSMGVPEKRVIMYGQGTQVTVSSGGGGSGGGGS |
| 9GS-ALB8 | | GGGGSGGGGSGGGGSGGGGSGGGGSEVQLVESGGGLVQPGGSL |
| | | RLSCAASGSIGGLNAMAWYRQAPGKERELVAGIFGVGSTRYADS |
| | | VKGRFTISRDIAKNTVFLQMNSLNSEDTAVYYCRMSSVTRGSSDY |
| | | WGQGTQVTVSSGGGGSGGGSEVQLVESGGGLVQPGNSLRLSCAA |
| | | SGFTFSSFGMSWVRQAPGKGLEWVSSISGSGSDTLYADSVKGRFTI |
| | | SRDNAKTTLYLQMNSLRPEDTAVYYCTIGGSLSRSSQGTLVTVSS |
| 18G11- | 188 | EVQLVESGGGLVQPGGSLRLSCAASGTLFKINAMGWYRQAPGKR |
| 35GS- | | RELVALITSSDTTDYAESVEGRFTISRDNTWNAVYLQMNSLKPED |
| 17E08- | | TAVYYCHSDHYSMGVPEKRVIMYGQGTQVTVSSGGGGSGGGGS |
| 9GS-ALB8 | | GGGGSGGGGSGGGGSGGGGSGGGGSEVQLVESGGGLVQPGGSL |
| | | RLSCSASGSIFGLNAMGWYRQTPGKERELVAGITSITRVGSTRYAD |
| | | SAKGRFTISGDYAKNTVYLQMNSLKPEDTGVYYCRMSIVKSGGA |
| | | DYWGQGTQVTVSSGGGGSGGGSEVQLVESGGGLVQPGNSLRLSC |
| | | AASGFTFSSFGMSWVRQAPGKGLEWVSSISGSGSDTLYADSVKGR |
| | | FTISRDNAKTTLYLQMNSLRPEDTAVYYCTIGGSLSRSSQGTLVTV |
| | | SS |
| 21F06- | 189 | EVQLVESGGGLVQAGGSLRLSCAASGRTYYLNAMGWFRQGPGK |
| 35GS- | | DREFVAAIDWSDGNKDYADSVKGRFTISRDNAKNTVYLQMNSLK |
| 17B05- | | PEDTAVYYCAADTPPWGPMIYIESYDSWGQGTQVTVSSGGGGSG |
| 9GS-ALB8 | | GGGSGGGGSGGGGSGGGGSGGGGSGGGGSEVQLVESGGGLVQP |
| | | GGSLRLSCAASGSIGGLNAMAWYRQAPGKERELVAGIFGVGSTR |
| | | YADSVKGRFTISRDIAKNTVFLQMNSLNSEDTAVYYCRMSSVTRG |
| | | SSDYWGQGTQVTVSSGGGGSGGGSEVQLVESGGGLVQPGNSLRL |
| | | SCAASGFTFSSFGMSWVRQAPGKGLEWVSSISGSGSDTLYADSVK |
| | | GRFTISRDNAKTTLYLQMNSLRPEDTAVYYCTIGGSLSRSSQGTLV |
| | | TVSS |
| 21F06- | 190 | EVQLVESGGGLVQAGGSLRLSCAASGRTYYLNAMGWFRQGPGK |
| 35GS- | | DREFVAAIDWSDGNKDYADSVKGRFTISRDNAKNTVYLQMNSLK |
| 17E08- | | PEDTAVYYCAADTPPWGPMIYIESYDSWGQGTQVTVSSGGGGSG |
| 9GS-ALB8 | | GGGSGGGGSGGGGSGGGGSGGGGSGGGGSEVQLVESGGGLVQP |
| | | GGSLRLSCSASGSIFGLNAMGWYRQTPGKERELVAGITSITRVGST |
| | | RYADSAKGRFTISGDYAKNTVYLQMNSLKPEDTGVYYCRMSIVK |
| | | SGGADYWGQGTQVTVSSGGGGSGGGSEVQLVESGGGLVQPGNS |
| | | LRLSCAASGFTFSSFGMSWVRQAPGKGLEWVSSISGSGSDTLYAD |
| | | SVKGRFTISRDNAKTTLYLQMNSLRPEDTAVYYCTIGGSLSRSSQG |
| | | TLVTVSS |
| 34C07- | 191 | EVQLVESGGGLVQPGGSLGLSCVASGSIFRINAMAWYRQAPGKQ |
| 35GS- | | RELVAEITAGGSTNYADSVKGRFTISVDNAWNTLYLQMNSLKVE |
| 17C08- | | DTAVYYCNLDHYTTWDRRSAYWGQGTQVTVSSGGGGSGGGGS |
| 9GS-ALB8 | | GGGGSGGGGSGGGGSGGGGSGGGGSEVQLVESGGGLMQAGDSL |
| | | RLSCAASGRAFSSYALGWFRRAPGKERECVAATDRLGDNTYFPD |
| | | SVKGRFTISRDNAKNTLYLQMNNLKPEDTAVYYCAAGAVRYGVS |
| | | TSPMNYNYWGQGTQVTVSSGGGGSGGGSEVQLVESGGGLVQPG |
| | | NSLRLSCAASGFTFSSFGMSWVRQAPGKGLEWVSSISGSGSDTLY |
| | | ADSVKGRFTISRDNAKTTLYLQMNSLRPEDTAVYYCTIGGSLSRSS |
| | | QGTLVTVSS |
| 34C07- | 192 | EVQLVESGGGLVQPGGSLGLSCVASGSIFRINAMAWYRQAPGKQ |
| 35GS- | | RELVAEITAGGSTNYADSVKGRFTISVDNAWNTLYLQMNSLKVE |
| 18G11- | | DTAVYYCNLDHYTTWDRRSAYWGQGTQVTVSSGGGGSGGGGS |
| 9GS-ALB8 | | GGGGSGGGGSGGGGSGGGGSGGGGSEVQLVESGGGLVQPGGSL |
| | | RLSCAASGTLFKINAMGWYRQAPGKRRELVALITSSDTTDYAESV |
| | | EGRFTISRDNTWNAVYLQMNSLKPEDTAVYYCHSDHYSMGVPEK |
| | | RVIMYGQGTQVTVSSGGGGSGGGSEVQLVESGGGLVQPGNSLRL |
| | | SCAASGFTFSSFGMSWVRQAPGKGLEWVSSISGSGSDTLYADSVK |
| | | GRFTISRDNAKTTLYLQMNSLRPEDTAVYYCTIGGSLSRSSQGTLV |
| | | TVSS |
| 34C07- | 193 | EVQLVESGGGLVQPGGSLGLSCVASGSIFRINAMAWYRQAPGKQ |
| 35GS- | | RELVAEITAGGSTNYADSVKGRFTISVDNAWNTLYLQMNSLKVE |
| 17B05- | | DTAVYYCNLDHYTTWDRRSAYWGQGTQVTVSSGGGGSGGGGS |
| 9GS-ALB8 | | GGGGSGGGGSGGGGSGGGGSGGGGSEVQLVESGGGLVQPGGSL |
| | | RLSCAASGSIGGLNAMAWYRQAPGKERELVAGIFGVGSTRYADS |
| | | VKGRFTISRDIAKNTVFLQMNSLNSEDTAVYYCRMSSVTRGSSDY |
| | | WGQGTQVTVSSGGGGSGGGSEVQLVESGGGLVQPGNSLRLSCAA |
| | | SGFTFSSFGMSWVRQAPGKGLEWVSSISGSGSDTLYADSVKGRFTI |
| | | SRDNAKTTLYLQMNSLRPEDTAVYYCTIGGSLSRSSQGTLVTVSS |
| 34C07- | 194 | EVQLVESGGGLVQPGGSLGLSCVASGSIFRINAMAWYRQAPGKQ |
| 35GS- | | RELVAEITAGGSTNYADSVKGRFTISVDNAWNTLYLQMNSLKVE |
| 17E08- | | DTAVYYCNLDHYTTWDRRSAYWGQGTQVTVSSGGGGSGGGGS |
| 9GS-ALB8 | | GGGGSGGGGSGGGGSGGGGSGGGGSEVQLVESGGGLVQPGGSL |
| | | RLSCSASGSIFGLNAMGWYRQTPGKERELVAGITSITRVGSTRYAD |
| | | SAKGRFTISGDYAKNTVYLQMNSLKPEDTGVYYCRMSIVKSGGA |
| | | DYWGQGTQVTVSSGGGGSGGGSEVQLVESGGGLVQPGNSLRLSC |
| | | AASGFTFSSFGMSWVRQAPGKGLEWVSSISGSGSDTLYADSVKGR |
| | | FTISRDNAKTTLYLQMNSLRPEDTAVYYCTIGGSLSRSSQGTLVTV |
| | | SS |
| 17B05- | 195 | EVQLVESGGGLVQPGGSLRLSCAASGSIGGLNAMAWYRQAPGKE |
| 35GS- | | RELVAGIFGVGSTRYADSVKGRFTISRDIAKNTVFLQMNSLNSEDT |
| 4C07-9GS- | | AVYYCRMSSVTRGSSDYWGQGTQVTVSSGGGGSGGGGSGGGGS |
| ALB8 | | GGGGSGGGGSGGGGSGGGGSEVQLVESGGGLVQAGGSLRLSCA |
| | | ASGFTFSSYPMSWVRQAPGKGPAWVSTVSPGGITTSYADSVKGRF |
| | | TISRDNAKNTLYLQMNSLKPEDTAVYYCLRDLNNRGQGTQVTVS |
| | | SGGGGSGGGSEVQLVESGGGLVQPGNSLRLSCAASGFTFSSFGMS |
| | | WVRQAPGKGLEWVSSISGSGSDTLYADSVKGRFTISRDNAKTTLY |
| | | LQMNSLRPEDTAVYYCTIGGSLSRSSQGTLVTVSS |
| 17B05- | 196 | EVQLVESGGGLVQPGGSLRLSCAASGSIGGLNAMAWYRQAPGKE |
| 35GS- | | RELVAGIFGVGSTRYADSVKGRFTISRDIAKNTVFLQMNSLNSEDT |
| 17C08- | | AVYYCRMSSVTRGSSDYWGQGTQVTVSSGGGGSGGGGSGGGGS |
| 9GS-ALB8 | | GGGGSGGGGSGGGGSGGGGSEVQLVESGGGLMQAGDSLRLSCA |
| | | ASGRAFSSYALGWFRRAPGKERECVAATDRLGDNTYFPDSVKGR |
| | | FTISRDNAKNTLYLQMNNLKPEDTAVYYCAAGAVRYGVSTSPMN |
| | | YNYWGQGTQVTVSSGGGGSGGGSEVQLVESGGGLVQPGNSLRLS |
| | | CAASGFTFSSFGMSWVRQAPGKGLEWVSSISGSGSDTLYADSVKG |
| | | RFTISRDNAKTTLYLQMNSLRPEDTAVYYCTIGGSLSRSSQGTLVT |
| | | VSS |
| 17B05- | 197 | EVQLVESGGGLVQPGGSLRLSCAASGSIGGLNAMAWYRQAPGKE |
| 35GS- | | RELVAGIFGVGSTRYADSVKGRFTISRDIAKNTVFLQMNSLNSEDT |
| 18F05- | | AVYYCRMSSVTRGSSDYWGQGTQVTVSSGGGGSGGGGSGGGGS |
| 9GS-ALB8 | | GGGGSGGGGSGGGGSGGGGSEVQLVESGGGLVQPGGSLRLSCVA |
| | | SGFTFSSYWMYWVRQAPGKGVEWVSAISPGGVERYTDSVKGRFT |
| | | ISRDNAKNTLYLQMNSLKSEDTAMYYCARLTSFATPESQGTQVTV |
| | | SSGGGGSGGGSEVQLVESGGGLVQPGNSLRLSCAASGFTFSSFGM |
| | | SWVRQAPGKGLEWVSSISGSGSDTLYADSVKGRFTISRDNAKTTL |
| | | YLQMNSLRPEDTAVYYCTIGGSLSRSSQGTLVTVSS |
| 17B05- | 198 | EVQLVESGGGLVQPGGSLRLSCAASGSIGGLNAMAWYRQAPGKE |
| 35GS- | | RELVAGIFGVGSTRYADSVKGRFTISRDIAKNTVFLQMNSLNSEDT |
| 18G11- | | AVYYCRMSSVTRGSSDYWGQGTQVTVSSGGGGSGGGGSGGGGS |
| 9GS-ALB8 | | GGGGSGGGGSGGGGSGGGGSEVQLVESGGGLVQPGGSLRLSCAA |
| | | SGTLFKINAMGWYRQAPGKRRELVALITSSDTTDYAESVEGRFTIS |
| | | RDNTWNAVYLQMNSLKPEDTAVYYCHSDHYSMGVPEKRVIMYG |
| | | QGTQVTVSSGGGGSGGGSEVQLVESGGGLVQPGNSLRLSCAASG |
| | | FTFSSFGMSWVRQAPGKGLEWVSSISGSGSDTLYADSVKGRFTISR |
| | | DNAKTTLYLQMNSLRPEDTAVYYCTIGGSLSRSSQGTLVTVSS |
| 17B05- | 199 | EVQLVESGGGLVQPGGSLRLSCAASGSIGGLNAMAWYRQAPGKE |
| 35GS- | | RELVAGIFGVGSTRYADSVKGRFTISRDIAKNTVFLQMNSLNSEDT |
| 21F06- | | AVYYCRMSSVTRGSSDYWGQGTQVTVSSGGGGSGGGGSGGGGS |
| 9GS-ALB8 | | GGGGSGGGGSGGGGSGGGGSEVQLVESGGGLVQAGGSLRLSCA |
| | | ASGRTYYLNAMGWFRQGPGKDREFVAAIDWSDGNKDYADSVKG |
| | | RFTISRDNAKNTVYLQMNSLKPEDTAVYYCAADTPPWGPMIYIES |
| | | YDSWGQGTQVTVSSGGGGSGGGSEVQLVESGGGLVQPGNSLRLS |
| | | CAASGFTFSSFGMSWVRQAPGKGLEWVSSISGSGSDTLYADSVKG |
| | | RFTISRDNAKTTLYLQMNSLRPEDTAVYYCTIGGSLSRSSQGTLVT |
| | | VSS |
| 17B05- | 200 | EVQLVESGGGLVQPGGSLRLSCAASGSIGGLNAMAWYRQAPGKE |
| 35GS- | | RELVAGIFGVGSTRYADSVKGRFTISRDIAKNTVFLQMNSLNSEDT |
| 34C07- | | AVYYCRMSSVTRGSSDYWGQGTQVTVSSGGGGSGGGGSGGGGS |
| 9GS-ALB8 | | GGGGSGGGGSGGGGSGGGGSEVQLVESGGGLVQPGGSLGLSCVA |
| | | SGSIFRINAMAWYRQAPGKQRELVAEITAGGSTNYADSVKGRFTI |
| | | SVDNAWNTLYLQMNSLKVEDTAVYYCNLDHYTTWDRRSAYWG |
| | | QGTQVTVSSGGGGSGGGSEVQLVESGGGLVQPGNSLRLSCAASG |
| | | FTFSSFGMSWVRQAPGKGLEWVSSISGSGSDTLYADSVKGRFTISR |
| | | DNAKTTLYLQMNSLRPEDTAVYYCTIGGSLSRSSQGTLVTVSS |
| 17B05- | 201 | EVQLVESGGGLVQPGGSLRLSCAASGSIGGLNAMAWYRQAPGKE |
| 35GS- | | RELVAGIFGVGSTRYADSVKGRFTISRDIAKNTVFLQMNSLNSEDT |
| 17B05- | | AVYYCRMSSVTRGSSDYWGQGTQVTVSSGGGGSGGGGSGGGGS |
| 9GS-ALB8 | | GGGGSGGGGSGGGGSGGGGSEVQLVESGGGLVQPGGSLRLSCAA |
| | | SGSIGGLNAMAWYRQAPGKERELVAGIFGVGSTRYADSVKGRFTI |
| | | SRDIAKNTVFLQMNSLNSEDTAVYYCRMSSVTRGSSDYWGQGTQ |
| | | VTVSSGGGGSGGGSEVQLVESGGGLVQPGNSLRLSCAASGFTFSS |
| | | FGMSWVRQAPGKGLEWVSSISGSGSDTLYADSVKGRFTISRDNAK |
| | | TTLYLQMNSLRPEDTAVYYCTIGGSLSRSSQGTLVTVSS |
| 17B05- | 202 | EVQLVESGGGLVQPGGSLRLSCAASGSIGGLNAMAWYRQAPGKE |
| 35GS- | | RELVAGIFGVGSTRYADSVKGRFTISRDIAKNTVFLQMNSLNSEDT |
| 17E08- | | AVYYCRMSSVTRGSSDYWGQGTQVTVSSGGGGSGGGGSGGGGS |
| 9GS-ALB8 | | GGGGSGGGGSGGGGSGGGGSEVQLVESGGGLVQPGGSLRLSCSA |
| | | SGSIFGLNAMGWYRQTPGKERELVAGITSITRVGSTRYADSAKGR |
| | | FTISGDYAKNTVYLQMNSLKPEDTGVYYCRMSIVKSGGADYWGQ |
| | | GTQVTVSSGGGGSGGGSEVQLVESGGGLVQPGNSLRLSCAASGFT |
| | | FSSFGMSWVRQAPGKGLEWVSSISGSGSDTLYADSVKGRFTISRD |
| | | NAKTTLYLQMNSLRPEDTAVYYCTIGGSLSRSSQGTLVTVSS |
| 17E08- | 203 | EVQLVESGGGLVQPGGSLRLSCSASGSIFGLNAMGWYRQTPGKER |
| 35GS- | | ELVAGITSITRVGSTRYADSAKGRFTISGDYAKNTVYLQMNSLKPE |
| 4C07-9GS- | | DTGVYYCRMSIVKSGGADYWGQGTQVTVSSGGGGSGGGGSGGG |
| ALB8 | | GSGGGGSGGGGSGGGGSGGGGSEVQLVESGGGLVQAGGSLRLSC |
| | | AASGFTFSSYPMSWVRQAPGKGPAWVSTVSPGGITTSYADSVKG |
| | | RFTISRDNAKNTLYLQMNSLKPEDTAVYYCLRDLNNRGQGTQVT |
| | | VSSGGGGSGGGSEVQLVESGGGLVQPGNSLRLSCAASGFTFSSFG |
| | | MSWVRQAPGKGLEWVSSISGSGSDTLYADSVKGRFTISRDNAKTT |
| | | LYLQMNSLRPEDTAVYYCTIGGSLSRSSQGTLVTVSS |
| 17E08- | 204 | EVQLVESGGGLVQPGGSLRLSCSASGSIFGLNAMGWYRQTPGKER |
| 35GS- | | ELVAGITSITRVGSTRYADSAKGRFTISGDYAKNTVYLQMNSLKPE |
| 17C08- | | DTGVYYCRMSIVKSGGADYWGQGTQVTVSSGGGGSGGGGSGGG |
| 9GS-ALB8 | | GSGGGGSGGGGSGGGGSGGGGSEVQLVESGGGLMQAGDSLRLS |
| | | CAASGRAFSSYALGWFRRAPGKERECVAATDRLGDNTYFPDSVK |
| | | GRFTISRDNAKNTLYLQMNNLKPEDTAVYYCAAGAVRYGVSTSP |
| | | MNYNYWGQGTQVTVSSGGGGSGGGSEVQLVESGGGLVQPGNSL |
| | | RLSCAASGFTFSSFGMSWVRQAPGKGLEWVSSISGSGSDTLYADS |
| | | VKGRFTISRDNAKTTLYLQMNSLRPEDTAVYYCTIGGSLSRSSQGT |
| | | LVTVSS |
| 17E08- | 205 | EVQLVESGGGLVQPGGSLRLSCSASGSIFGLNAMGWYRQTPGKER |
| 35GS- | | ELVAGITSITRVGSTRYADSAKGRFTISGDYAKNTVYLQMNSLKPE |
| 18F05- | | DTGVYYCRMSIVKSGGADYWGQGTQVTVSSGGGGSGGGGSGGG |
| 9GS-ALB8 | | GSGGGGSGGGGSGGGGSGGGGSEVQLVESGGGLVQPGGSLRLSC |
| | | VASGFTFSSYWMYWVRQAPGKGVEWVSAISPGGVERYTDSVKG |
| | | RFTISRDNAKNTLYLQMNSLKSEDTAMYYCARLTSFATPESQGTQ |
| | | VTVSSGGGGSGGGSEVQLVESGGGLVQPGNSLRLSCAASGFTFSS |
| | | FGMSWVRQAPGKGLEWVSSISGSGSDTLYADSVKGRFTISRDNAK |
| | | TTLYLQMNSLRPEDTAVYYCTIGGSLSRSSQGTLVTVSS |
| 17E08- | 206 | EVQLVESGGGLVQPGGSLRLSCSASGSIFGLNAMGWYRQTPGKER |
| 35GS- | | ELVAGITSITRVGSTRYADSAKGRFTISGDYAKNTVYLQMNSLKPE |
| 18G11- | | DTGVYYCRMSIVKSGGADYWGQGTQVTVSSGGGGSGGGGSGGG |
| 9GS-ALB8 | | GSGGGGSGGGGSGGGGSGGGGSEVQLVESGGGLVQPGGSLRLSC |
| | | AASGTLFKINAMGWYRQAPGKRRELVALITSSDTTDYAESVEGRF |
| | | TISRDNTWNAVYLQMNSLKPEDTAVYYCHSDHYSMGVPEKRVIM |
| | | YGQGTQVTVSSGGGGSGGGSEVQLVESGGGLVQPGNSLRLSCAA |
| | | SGFTFSSFGMSWVRQAPGKGLEWVSSISGSGSDTLYADSVKGRFTI |
| | | SRDNAKTTLYLQMNSLRPEDTAVYYCTIGGSLSRSSQGTLVTVSS |
| 17E08- | 207 | EVQLVESGGGLVQPGGSLRLSCSASGSIFGLNAMGWYRQTPGKER |
| 35GS- | | ELVAGITSITRVGSTRYADSAKGRFTISGDYAKNTVYLQMNSLKPE |
| 21F06- | | DTGVYYCRMSIVKSGGADYWGQGTQVTVSSGGGGSGGGGSGGG |
| 9GS-ALB8 | | GSGGGGSGGGGSGGGGSGGGGSEVQLVESGGGLVQAGGSLRLSC |
| | | AASGRTYYLNAMGWFRQGPGKDREFVAAIDWSDGNKDYADSVK |
| | | GRFTISRDNAKNTVYLQMNSLKPEDTAVYYCAADTPPWGPMIYIE |
| | | SYDSWGQGTQVTVSSGGGGSGGGSEVQLVESGGGLVQPGNSLRL |
| | | SCAASGFTFSSFGMSWVRQAPGKGLEWVSSISGSGSDTLYADSVK |
| | | GRFTISRDNAKTTLYLQMNSLRPEDTAVYYCTIGGSLSRSSQGTLV |
| | | TVSS |
| 17E08- | 208 | EVQLVESGGGLVQPGGSLRLSCSASGSIFGLNAMGWYRQTPGKER |
| 35GS- | | ELVAGITSITRVGSTRYADSAKGRFTISGDYAKNTVYLQMNSLKPE |
| 34C07- | | DTGVYYCRMSIVKSGGADYWGQGTQVTVSSGGGGSGGGGSGGG |
| 9GS-ALB8 | | GSGGGGSGGGGSGGGGSGGGGSEVQLVESGGGLVQPGGSLGLSC |
| | | VASGSIFRINAMAWYRQAPGKQRELVAEITAGGSTNYADSVKGRF |
| | | TISVDNAWNTLYLQMNSLKVEDTAVYYCNLDHYTTWDRRSAYW |
| | | GQGTQVTVSSGGGGSGGGSEVQLVESGGGLVQPGNSLRLSCAAS |
| | | GFTFSSFGMSWVRQAPGKGLEWVSSISGSGSDTLYADSVKGRFTIS |
| | | RDNAKTTLYLQMNSLRPEDTAVYYCTIGGSLSRSSQGTLVTVSS |
| 17E08- | 209 | EVQLVESGGGLVQPGGSLRLSCSASGSIFGLNAMGWYRQTPGKER |
| 35GS- | | ELVAGITSITRVGSTRYADSAKGRFTISGDYAKNTVYLQMNSLKPE |
| 17B05- | | DTGVYYCRMSIVKSGGADYWGQGTQVTVSSGGGGSGGGGSGGG |
| 9GS-ALB8 | | GSGGGGSGGGGSGGGGSGGGGSEVQLVESGGGLVQPGGSLRLSC |
| | | AASGSIGGLNAMAWYRQAPGKERELVAGIFGVGSTRYADSVKGR |
| | | FTISRDIAKNTVFLQMNSLNSEDTAVYYCRMSSVTRGSSDYWGQG |
| | | TQVTVSSGGGGSGGGSEVQLVESGGGLVQPGNSLRLSCAASGFTF |
| | | SSFGMSWVRQAPGKGLEWVSSISGSGSDTLYADSVKGRFTISRDN |
| | | AKTTLYLQMNSLRPEDTAVYYCTIGGSLSRSSQGTLVTVSS |
| 17E08- | 210 | EVQLVESGGGLVQPGGSLRLSCSASGSIFGLNAMGWYRQTPGKER |
| 35GS- | | ELVAGITSITRVGSTRYADSAKGRFTISGDYAKNTVYLQMNSLKPE |
| 17E08- | | DTGVYYCRMSIVKSGGADYWGQGTQVTVSSGGGGSGGGGSGGG |
| 9GS-ALB8 | | GSGGGGSGGGGSGGGGSGGGGSEVQLVESGGGLVQPGGSLRLSC |
| | | SASGSIFGLNAMGWYRQTPGKERELVAGITSITRVGSTRYADSAK |
| | | GRFTISGDYAKNTVYLQMNSLKPEDTGVYYCRMSIVKSGGADYW |
| | | GQGTQVTVSSGGGGSGGGSEVQLVESGGGLVQPGNSLRLSCAAS |
| | | GFTFSSFGMSWVRQAPGKGLEWVSSISGSGSDTLYADSVKGRFTIS |
| | | RDNAKTTLYLQMNSLRPEDTAVYYCTIGGSLSRSSQGTLVTVSS |
| HER3MS00022 | 211 | EVQLVESGGGLVQAGGSLRLSCAASGRTYYLNAMGWFRQGPGK |
| | | DREFVAAIDWSDGNKDYADSVKGRFTISRDNAKNTVYLQMNSLK |
| | | PEDTAVYYCAADTPPWGPMIYIESYDSWGQGTLVTVSSGGGGSG |
| | | GGGSGGGGSGGGGSGGGGSGGGGSGGGGSEVQLVESGGGLVQA |
| | | GGSLRLSCAASGRTYYLNAMGWFRQGPGKDREFVAAIDWSDGN |
| | | KDYADSVKGRFTISRDNAKNTVYLQMNSLKPEDTAVYYCAADTP |
| | | PWGPMIYIESYDSWGQGTLVTVSSGGGGSGGGSEVQLVESGGGL |
| | | VQPGNSLRLSCAASGFTFSSFGMSWVRQAPGKGLEWVSSISGSGS |
| | | DTLYADSVKGRFTISRDNAKTTLYLQMNSLRPEDTAVYYCTIGGS |
| | | LSRSSQGTLVTVSS |
| HER3MS00023 | 212 | EVQLVESGGGLVQAGGSLRLSCAASGRTYYLNAMGWFRQGPGK |
| | | DREFVAAIDWSDGNKDYADSVKGRFTISRDNAKNTVYLQMNSLK |
| | | PEDTAVYYCAADTPPWGPMIYIESYDSWGQGTLVTVSSGGGGSG |
| | | GGGSGGGGSGGGGSGGGGSGGGGSGGGGSEVQLVESGGGLVQP |
| | | GGSLGLSCVASGSIFRINAMAWYRQAPGKQRELVAEITAGGSTNY |
| | | ADSVKGRFTISVDNAWNTLYLQMNSLKVEDTAVYYCNLDHYTT |
| | | WDRRSAYWGQGTLVTVSSGGGGSGGGSEVQLVESGGGLVQPGN |
| | | SLRLSCAASGFTFSSFGMSWVRQAPGKGLEWVSSISGSGSDTLYA |
| | | DSVKGRFTISRDNAKTTLYLQMNSLRPEDTAVYYCTIGGSLSRSSQ |
| | | GTLVTVSS |
| HER3MS00024 | 213 | EVQLVESGGGLVQAGGSLRLSCAASGRTYYLNAMGWFRQGPGK |
| | | DREFVAAIDWSDGNKDYADSVKGRFTISRDNAKNTVYLQMNSLK |
| | | PEDTAVYYCAADTPPWGPMIYIESYDSWGQGTLVTVSSGGGGSG |
| | | GGGSGGGGSGGGGSGGGGSGGGGSGGGGSEVQLVESGGGLVQA |
| | | GGSLRLSCAASGFTFSSYPMSWVRQAPGKGPAWVSTVSPGGITTS |
| | | YADSVKGRFTISRDNAKNTLYLQMNSLKPEDTAVYYCLRDLNNR |
| | | GQGTLVTVSSGGGGSGGGSEVQLVESGGGLVQPGNSLRLSCAAS |
| | | GFTFSSFGMSWVRQAPGKGLEWVSSISGSGSDTLYADSVKGRFTIS |
| | | RDNAKTTLYLQMNSLRPEDTAVYYCTIGGSLSRSSQGTLVTVSS |
| HER3MS00026 | 214 | EVQLVESGGGLVQPGGSLGLSCVASGSIFRINAMAWYRQAPGKQ |
| | | RELVAEITAGGSTNYADSVKGRFTISVDNAWNTLYLQMNSLKVE |
| | | DTAVYYCNLDHYTTWDRRSAYWGQGTLVTVSSGGGGSGGGGSG |
| | | GGGSGGGGSGGGGSGGGGSGGGGSEVQLVESGGGLVQAGGSLR |
| | | LSCAASGRTYYLNAMGWFRQGPGKDREFVAAIDWSDGNKDYAD |
| | | SVKGRFTISRDNAKNTVYLQMNSLKPEDTAVYYCAADTPPWGPM |
| | | IYIESYDSWGQGTLVTVSSGGGGSGGGSEVQLVESGGGLVQPGNS |
| | | LRLSCAASGFTFSSFGMSWVRQAPGKGLEWVSSISGSGSDTLYAD |
| | | SVKGRFTISRDNAKTTLYLQMNSLRPEDTAVYYCTIGGSLSRSSQG |
| | | TLVTVSS |
| HER3MS00028 | 215 | EVQLVESGGGLVQPGGSLGLSCVASGSIFRINAMAWYRQAPGKQ |
| | | RELVAEITAGGSTNYADSVKGRFTISVDNAWNTLYLQMNSLKVE |
| | | DTAVYYCNLDHYTTWDRRSAYWGQGTLVTVSSGGGGSGGGGSG |
| | | GGGSGGGGSGGGGSGGGGSGGGGSEVQLVESGGGLVQAGGSLR |
| | | LSCAASGFTFSSYPMSWVRQAPGKGPAWVSTVSPGGITTSYADSV |
| | | KGRFTISRDNAKNTLYLQMNSLKPEDTAVYYCLRDLNNRGQGTL |
| | | VTVSSGGGGSGGGSEVQLVESGGGLVQPGNSLRLSCAASGFTFSS |
| | | FGMSWVRQAPGKGLEWVSSISGSGSDTLYADSVKGRFTISRDNAK |
| | | TTLYLQMNSLRPEDTAVYYCTIGGSLSRSSQGTLVTVSS |
| HER3MS00030 | 216 | EVQLVESGGGLVQAGGSLRLSCAASGFTFSSYPMSWVRQAPGKG |
| | | PAWVSTVSPGGITTSYADSVKGRFTISRDNAKNTLYLQMNSLKPE |
| | | DTAVYYCLRDLNNRGQGTLVTVSSGGGGSGGGGSGGGGSGGGG |
| | | SGGGGSGGGGSGGGGSEVQLVESGGGLVQAGGSLRLSCAASGRT |
| | | YYLNAMGWFRQGPGKDREFVAAIDWSDGNKDYADSVKGRFTIS |
| | | RDNAKNTVYLQMNSLKPEDTAVYYCAADTPPWGPMIYIESYDSW |
| | | GQGTLVTVSSGGGGSGGGSEVQLVESGGGLVQPGNSLRLSCAAS |
| | | GFTFSSFGMSWVRQAPGKGLEWVSSISGSGSDTLYADSVKGRFTIS |
| | | RDNAKTTLYLQMNSLRPEDTAVYYCTIGGSLSRSSQGTLVTVSS |
| HER3MS00031 | 217 | EVQLVESGGGLVQAGGSLRLSCAASGFTFSSYPMSWVRQAPGKG |
| | | PAWVSTVSPGGITTSYADSVKGRFTISRDNAKNTLYLQMNSLKPE |
| | | DTAVYYCLRDLNNRGQGTLVTVSSGGGGSGGGGSGGGGSGGGG |
| | | SGGGGSGGGGSGGGGSEVQLVESGGGLVQPGGSLGLSCVASGSIF |
| | | RINAMAWYRQAPGKQRELVAEITAGGSTNYADSVKGRFTISVDN |
| | | AWNTLYLQMNSLKVEDTAVYYCNLDHYTTWDRRSAYWGQGTL |
| | | VTVSSGGGGSGGGSEVQLVESGGGLVQPGNSLRLSCAASGFTFSS |
| | | FGMSWVRQAPGKGLEWVSSISGSGSDTLYADSVKGRFTISRDNAK |
| | | TTLYLQMNSLRPEDTAVYYCTIGGSLSRSSQGTLVTVSS |
| HER3MS00032 | 218 | EVQLVESGGGLVQAGGSLRLSCAASGFTFSSYPMSWVRQAPGKG |
| | | PAWVSTVSPGGITTSYADSVKGRFTISRDNAKNTLYLQMNSLKPE |
| | | DTAVYYCLRDLNNRGQGTLVTVSSGGGGSGGGGSGGGGSGGGG |
| | | SGGGGSGGGGSGGGGSEVQLVESGGGLVQAGGSLRLSCAASGFT |
| | | FSSYPMSWVRQAPGKGPAWVSTVSPGGITTSYADSVKGRFTISRD |
| | | NAKNTLYLQMNSLKPEDTAVYYCLRDLNNRGQGTLVTVSSGGG |
| | | GSGGGSEVQLVESGGGLVQPGNSLRLSCAASGFTFSSFGMSWVRQ |
| | | APGKGLEWVSSISGSGSDTLYADSVKGRFTISRDNAKTTLYLQMN |
| | | SLRPEDTAVYYCTIGGSLSRSSQGTLVTVSS |
| HER3MS00034 | 219 | EVQLVESGGGLVQAGGSLRLSCAASGRTYYLNAMGWFRQGPGK |
| | | DREFVAAIDWSDGNKDYADSVKGRFTISRDNAKNTVYLQMNSLK |
| | | PEDTAVYYCAADTPPWGPMIYIESYDSWGQGTLVTVSSGGGGSG |
| | | GGGSGGGGSGGGGSGGGGSGGGGSGGGGSEVQLVESGGGLVQP |
| | | GGSLRLSCAASGTLFKINAMGWYRQAPGKRRELVALITSSDTTDY |
| | | AESVEGRFTISRDNTWNAVYLQMNSLKPEDTAVYYCHSDHYSMG |
| | | VPEKRVIMYGQGTLVTVSSGGGGSGGGSEVQLVESGGGLVQPGN |
| | | SLRLSCAASGFTFSSFGMSWVRQAPGKGLEWVSSISGSGSDTLYA |
| | | DSVKGRFTISRDNAKTTLYLQMNSLRPEDTAVYYCTIGGSLSRSSQ |
| | | GTLVTVSS |
| HER3MS00035 | 220 | EVQLVESGGGLVQAGGSLRLSCAASGFTFSSYPMSWVRQAPGKG |
| | | PAWVSTVSPGGITTSYADSVKGRFTISRDNAKNTLYLQMNSLKPE |
| | | DTAVYYCLRDLNNRGQGTLVTVSSGGGGSGGGGSGGGGSGGGG |
| | | SGGGGSGGGGSGGGGSEVQLVESGGGLVQPGGSLRLSCAASGTL |
| | | FKINAMGWYRQAPGKRRELVALITSSDTTDYAESVEGRFTISRDN |
| | | TWNAVYLQMNSLKPEDTAVYYCHSDHYSMGVPEKRVIMYGQGT |
| | | LVTVSSGGGGSGGGSEVQLVESGGGLVQPGNSLRLSCAASGFTFS |
| | | SFGMSWVRQAPGKGLEWVSSISGSGSDTLYADSVKGRFTISRDNA |
| | | KTTLYLQMNSLRPEDTAVYYCTIGGSLSRSSQGTLVTVSS |
| HER3MS00037 | 221 | EVQLVESGGGLVQPGGSLRLSCAASGTLFKINAMGWYRQAPGKR |
| | | RELVALITSSDTTDYAESVEGRFTISRDNTWNAVYLQMNSLKPED |
| | | TAVYYCHSDHYSMGVPEKRVIMYGQGTLVTVSSGGGGSGGGGS |
| | | GGGGSGGGGSGGGGSGGGGSGGGGSEVQLVESGGGLVQPGGSL |
| | | RLSCAASGTLFKINAMGWYRQAPGKRRELVALITSSDTTDYAESV |
| | | EGRFTISRDNTWNAVYLQMNSLKPEDTAVYYCHSDHYSMGVPEK |
| | | RVIMYGQGTLVTVSSGGGGSGGGSEVQLVESGGGLVQPGNSLRL |
| | | SCAASGFTFSSFGMSWVRQAPGKGLEWVSSISGSGSDTLYADSVK |
| | | GRFTISRDNAKTTLYLQMNSLRPEDTAVYYCTIGGSLSRSSQGTLV |
| | | TVSS |
| HER3MS00038 | 222 | EVQLVESGGGLVQPGGSLRLSCAASGTLFKINAMGWYRQAPGKR |
| | | RELVALITSSDTTDYAESVEGRFTISRDNTWNAVYLQMNSLKPED |
| | | TAVYYCHSDHYSMGVPEKRVIMYGQGTLVTVSSGGGGSGGGGS |
| | | GGGGSGGGGSGGGGSGGGGSGGGGSEVQLVESGGGLVQAGGSL |
| | | RLSCAASGRTYYLNAMGWFRQGPGKDREFVAAIDWSDGNKDYA |
| | | DSVKGRFTISRDNAKNTVYLQMNSLKPEDTAVYYCAADTPPWGP |
| | | MIYIESYDSWGQGTLVTVSSGGGGSGGGSEVQLVESGGGLVQPG |
| | | NSLRLSCAASGFTFSSFGMSWVRQAPGKGLEWVSSISGSGSDTLY |
| | | ADSVKGRFTISRDNAKTTLYLQMNSLRPEDTAVYYCTIGGSLSRSS |
| | | QGTLVTVSS |
| HER3MS00039 | 223 | EVQLVESGGGLVQPGGSLRLSCAASGTLFKINAMGWYRQAPGKR |
| | | RELVALITSSDTTDYAESVEGRFTISRDNTWNAVYLQMNSLKPED |
| | | TAVYYCHSDHYSMGVPEKRVIMYGQGTLVTVSSGGGGSGGGGS |
| | | GGGGSGGGGSGGGGSGGGGSGGGGSEVQLVESGGGLVQAGGSL |
| | | RLSCAASGFTFSSYPMSWVRQAPGKGPAWVSTVSPGGITTSYADS |
| | | VKGRFTISRDNAKNTLYLQMNSLKPEDTAVYYCLRDLNNRGQGT |
| | | LVTVSSGGGGSGGGSEVQLVESGGGLVQPGNSLRLSCAASGFTFS |
| | | SFGMSWVRQAPGKGLEWVSSISGSGSDTLYADSVKGRFTISRDNA |
| | | KTTLYLQMNSLRPEDTAVYYCTIGGSLSRSSQGTLVTVSS |
| HER3MS00042 | 224 | EVQLVESGGGLVQPGGSLRLSCAASGFTFSSYPMSWVRQAPGKGP |
| | | AWVSTVSPGGITTSYADSVKGRFTISRDNSKNTLYLQMNSLRPED |
| | | TAVYYCLRDLNNRGQGTLVTVSSAAAEQKLISEEDLNGAAHHHH |
| | | HH |
| HER3MS00043 | 225 | EVQLVESGGGLVQPGGSLRLSCAASGFTFSSYPMSWVRQAPGKGP |
| | | EWVSTVSPGGITTSYADSVKGRFTISRDNSKNTLYLQMNSLRPEDT |
| | | AVYYCLRDLNNRGQGTLVTVSSAAAEQKLISEEDLNGAAHHHHHH |
| HER3MS00044 | 226 | EVQLVESGGGLVQPGGSLRLSCAASGFTFSSYPMSWVRQAPGKGP |
| | | AWVSTVSPGGITTSYADSVKGRFTISRDNSKNTLYLQMNSLRPED |
| | | TAVYYCARDLNNRGQGTLVTVSSAAAEQKLISEEDLNGAAHHHH |
| | | HH |
| HER3MS00045 | 227 | EVQLVESGGGLVQPGGSLRLSCAASGFTFSSYPMSWVRQAPGKGP |
| | | EWVSTVSPGGITTSYADSVKGRFTISRDNSKNTLYLQMNSLRPEDT |
| | | AVYYCARDLNNRGQGTLVTVSSAAAEQKLISEEDLNGAAHHHHHH |
| HER3MS00046 | 228 | EVQLVESGGGLVQPGGSLRLSCAASGRTYYLNAMGWFRQGPGK |
| | | DREFVAAIDWSDGNKDYADSVKGRFTISRDNSKNTVYLQMNSLR |
| | | PEDTAVYYCAADTPPWGPMIYIESYDSWGQGTLVTVSSAAAEQK |
| | | LISEEDLNGAAHHHHHH |
| HER3MS00047 | 229 | EVQLVESGGGLVQPGGSLRLSCAASGRTYYLNAMGWFRQAPGK |
| | | DREFVAAIDWSDGNKDYADSVKGRFTISRDNSKNTVYLQMNSLR |
| | | PEDTAVYYCAADTPPWGPMIYIESYDSWGQGTLVTVSSAAAEQK |
| | | LISEEDLNGAAHHHHHH |
| HER3MS00048 | 230 | EVQLVESGGGLVQPGGSLRLSCAASGRTYYLNAMGWFRQGPGKE |
| | | REFVAAIDWSDGNKDYADSVKGRFTISRDNSKNTVYLQMNSLRP |
| | | EDTAVYYCAADTPPWGPMIYIESYDSWGQGTLVTVSSAAAEQKLI |
| | | SEEDLNGAAHHHHHH |
| HER3MS00049 | 231 | EVQLVESGGGLVQPGGSLRLSCAASGRTYYLNAMGWFRQAPGKE |
| | | REFVAAIDWSDGNKDYADSVKGRFTISRDNSKNTVYLQMNSLRP |
| | | EDTAVYYCAADTPPWGPMIYIESYDSWGQGTLVTVSSAAAEQKLI |
| | | SEEDLNGAAHHHHHH |
| HER3MS00051 | 232 | EVQLVESGGGLVQPGGSLGLSCVASGSIFRINAMAWYRQAPGKQ |
| | | RELVAEITAGGSTNYADSVKGRFTISVDNAWNTLYLQMNSLKVE |
| | | DTAVYYCNLDHYTTWDRRSAYWGQGTLVTVSSGGGGSGGGGSG |
| | | GGGSGGGGSGGGGSGGGGSGGGGSEVQLVESGGGLVQPGGSLRL |
| | | SCAASGSIGGLNAMAWYRQAPGKERELVAGIFGVGSTRYADSVK |
| | | GRFTISRDIAKNTVFLQMNSLNSEDTAVYYCRMSSVTRGSSDYWG |
| | | QGTLVTVSSGGGGSGGGSEVQLVESGGGLVQPGNSLRLSCAASGF |
| | | TFSSFGMSWVRQAPGKGLEWVSSISGSGSDTLYADSVKGRFTISR |
| | | DNAKTTLYLQMNSLRPEDTAVYYCTIGGSLSRSSQGTLVTVSS |
| HER3MS00052 | 233 | EVQLVESGGGLVQPGGSLRLSCAASGTLFKINAMGWYRQAPGKR |
| | | RELVALITSSDTTDYAESVEGRFTISRDNTWNAVYLQMNSLKPED |
| | | TAVYYCHSDHYSMGVPEKRVIMYGQGTLVTVSSGGGGSGGGGS |
| | | GGGGSGGGGSGGGGSGGGGSGGGGSEVQLVESGGGLVQPGGSL |
| | | RLSCAASGSIGGLNAMAWYRQAPGKERELVAGIFGVGSTRYADS |
| | | VKGRFTISRDIAKNTVFLQMNSLNSEDTAVYYCRMSSVTRGSSDY |
| | | WGQGTLVTVSSGGGGSGGGSEVQLVESGGGLVQPGNSLRLSCAA |
| | | SGFTFSSFGMSWVRQAPGKGLEWVSSISGSGSDTLYADSVKGRFTI |
| | | SRDNAKTTLYLQMNSLRPEDTAVYYCTIGGSLSRSSQGTLVTVSS |
| HER3MS00054 | 234 | EVQLVESGGGLVQPGGSLRLSCAASGSIGGLNAMAWYRQAPGKE |
| | | RELVAGIFGVGSTRYADSVKGRFTISRDIAKNTVFLQMNSLNSEDT |
| | | AVYYCRMSSVTRGSSDYWGQGTLVTVSSGGGGSGGGGSGGGGS |
| | | GGGGSGGGGSGGGGSGGGGSEVQLVESGGGLVQPGGSLGLSCVA |
| | | SGSIFRINAMAWYRQAPGKQRELVAEITAGGSTNYADSVKGRFTI |
| | | SVDNAWNTLYLQMNSLKVEDTAVYYCNLDHYTTWDRRSAYWG |
| | | QGTLVTVSSGGGGSGGGSEVQLVESGGGLVQPGNSLRLSCAASGF |
| | | TFSSFGMSWVRQAPGKGLEWVSSISGSGSDTLYADSVKGRFTISR |
| | | DNAKTTLYLQMNSLRPEDTAVYYCTIGGSLSRSSQGTLVTVSS |
| HER3MS00055 | 235 | EVQLVESGGGLVQAGGSLRLSCAASGFTFSSYPMSWVRQAPGKG |
| | | PAWVSTVSPGGITTSYADSVKGRFTISRDNAKNTLYLQMNSLKPE |
| | | DTAVYYCLRDLNNRGQGTLVTVSSGGGGSGGGGSGGGGSGGGG |
| | | SGGGGSGGGGSGGGGSEVQLVESGGGLVQPGGSLRLSCAASGSIG |
| | | GLNAMAWYRQAPGKERELVAGIFGVGSTRYADSVKGRFTISRDIA |
| | | KNTVFLQMNSLNSEDTAVYYCRMSSVTRGSSDYWGQGTLVTVSS |
| | | GGGGSGGGSEVQLVESGGGLVQPGNSLRLSCAASGFTFSSFGMS |
| | | WVRQAPGKGLEWVSSISGSGSDTLYADSVKGRFTISRDNAKTTLY |
| | | LQMNSLRPEDTAVYYCTIGGSLSRSSQGTLVTVSS |
| HER3MS00056 | 236 | EVQLVESGGGLVQPGGSLRLSCAASGSIGGLNAMAWYRQAPGKE |
| | | RELVAGIFGVGSTRYADSVKGRFTISRDIAKNTVFLQMNSLNSEDT |
| | | AVYYCRMSSVTRGSSDYWGQGTLVTVSSGGGGSGGGGSGGGGS |
| | | GGGGSGGGGSGGGGSGGGGSEVQLVESGGGLVQPGGSLRLSCAA |
| | | SGSIGGLNAMAWYRQAPGKERELVAGIFGVGSTRYADSVKGRFTI |
| | | SRDIAKNTVFLQMNSLNSEDTAVYYCRMSSVTRGSSDYWGQGTL |
| | | VTVSSGGGGSGGGSEVQLVESGGGLVQPGNSLRLSCAASGFTFSS |
| | | FGMSWVRQAPGKGLEWVSSISGSGSDTLYADSVKGRFTISRDNAK |
| | | TTLYLQMNSLRPEDTAVYYCTIGGSLSRSSQGTLVTVSS |
| HER3MS00057 | 237 | EVQLVESGGGLVQPGGSLRLSCAASGSIGGLNAMAWYRQAPGKE |
| | | RELVAGIFGVGSTRYADSVKGRFTISRDIAKNTVFLQMNSLNSEDT |
| | | AVYYCRMSSVTRGSSDYWGQGTLVTVSSGGGGSGGGGSGGGGS |
| | | GGGGSGGGGSGGGGSGGGGSEVQLVESGGGLVQAGGSLRLSCA |
| | | ASGFTFSSYPMSWVRQAPGKGPAWVSTVSPGGITTSYADSVKGRF |
| | | TISRDNAKNTLYLQMNSLKPEDTAVYYCLRDLNNRGQGTLVTVS |
| | | SGGGGSGGGSEVQLVESGGGLVQPGNSLRLSCAASGFTFSSFGMS |
| | | WVRQAPGKGLEWVSSISGSGSDTLYADSVKGRFTISRDNAKTTLY |
| | | LQMNSLRPEDTAVYYCTIGGSLSRSSQGTLVTVSS |
| HER3MS00058 | 238 | EVQLVESGGGLVQPGGSLRLSCAASGSIGGLNAMAWYRQAPGKE |
| | | RELVAGIFGVGSTRYADSVKGRFTISRDIAKNTVFLQMNSLNSEDT |
| | | AVYYCRMSSVTRGSSDYWGQGTLVTVSSGGGGSGGGGSGGGGS |
| | | GGGGSGGGGSGGGGSGGGGSEVQLVESGGGLVQPGGSLRLSCAA |
| | | SGTLFKINAMGWYRQAPGKRRELVALITSSDTTDYAESVEGRFTIS |
| | | RDNTWNAVYLQMNSLKPEDTAVYYCHSDHYSMGVPEKRVIMYG |
| | | QGTLVTVSSGGGGSGGGSEVQLVESGGGLVQPGNSLRLSCAASGF |
| | | TFSSFGMSWVRQAPGKGLEWVSSISGSGSDTLYADSVKGRFTISR |
| | | DNAKTTLYLQMNSLRPEDTAVYYCTIGGSLSRSSQGTLVTVSS |
| HER3MS00060 | 239 | EVQLVESGGGLVQAGGSLRLSCAASGRTYYLNAMGWFRQGPGK |
| | | DREFVAAIDWSDGNKDYADSVKGRFTISRDNAKNTVYLQMNSLK |
| | | PEDTAVYYCAADTPPWGPMIYIESYDSWGQGTLVTVSSGGGGSG |
| | | GGGSGGGGSGGGGSGGGGSGGGGSGGGGSEVQLVESGGGLVQP |
| | | GGSLRLSCAASGSIGGLNAMAWYRQAPGKERELVAGIFGVGSTR |
| | | YADSVKGRFTISRDIAKNTVFLQMNSLNSEDTAVYYCRMSSVTRG |
| | | SSDYWGQGTLVTVSSGGGGSGGGSEVQLVESGGGLVQPGNSLRL |
| | | SCAASGFTFSSFGMSWVRQAPGKGLEWVSSISGSGSDTLYADSVK |
| | | GRFTISRDNAKTTLYLQMNSLRPEDTAVYYCTIGGSLSRSSQGTLV |
| | | TVSS |
| HER3MS00061 | 240 | EVQLVESGGGLVQPGGSLRLSCAASGSIGGLNAMAWYRQAPGKE |
| | | RELVAGIFGVGSTRYADSVKGRFTISRDIAKNTVFLQMNSLNSEDT |
| | | AVYYCRMSSVTRGSSDYWGQGTLVTVSSGGGGSGGGGSGGGGS |
| | | GGGGSGGGGSGGGGSGGGGSEVQLVESGGGLVQAGGSLRLSCA |
| | | ASGRTYYLNAMGWFRQGPGKDREFVAAIDWSDGNKDYADSVKG |
| | | RFTISRDNAKNTVYLQMNSLKPEDTAVYYCAADTPPWGPMIYIES |
| | | YDSWGQGTLVTVSSGGGGSGGGSEVQLVESGGGLVQPGNSLRLS |
| | | CAASGFTFSSFGMSWVRQAPGKGLEWVSSISGSGSDTLYADSVKG |
| | | RFTISRDNAKTTLYLQMNSLRPEDTAVYYCTIGGSLSRSSQGTLVT |
| | | VSS |
| HER3MS00068 | 241 | EVQLVESGGGLVQPGGSLRLSCAASGTLFKINAMGWYRQAPGKR |
| | | RELVALITSSDTTDYAESVEGRFTISRDNTWNAVYLQMNSLKPED |
| | | TAVYYCHSDHYSGGVPEKRVIMYGQGTLVTVSSAAAEQKLISEED |
| | | LNGAAHHHHHH |
| HER3MS00069 | 242 | EVQLVESGGGLVQPGGSLRLSCAASGTLFKINAMGWYRQAPGKR |
| | | RELVALITSSDTTDYAESVEGRFTISRDNTWNAVYLQMNSLKPED |
| | | TAVYYCHSDHYSLGVPEKRVIMYGQGTLVTVSSAAAEQKLISEED |
| | | LNGAAHHHHHH |
| HER3MS00070 | 243 | EVQLVESGGGLVQPGGSLRLSCAASGTLFKINAMGWYRQAPGKR |
| | | RELVALITSSDTTDYAESVEGRFTISRDNTWNAVYLQMNSLKPED |
| | | TAVYYCHSDHYSIGVPEKRVIMYGQGTLVTVSSAAAEQKLISEED |
| | | LNGAAHHHHHH |
| HER3MS00071 | 244 | EVQLVESGGGLVQPGGSLRLSCAASGTLFKINAMGWYRQAPGKR |
| | | RELVALITSSDTTDYAESVEGRFTISRDNTWNAVYLQMNSLKPED |
| | | TAVYYCHSDHYSVGVPEKRVIMYGQGTLVTVSSAAAEQKLISEED |
| | | LNGAAHHHHHH |
| HER3MS00072 | 245 | EVQLVESGGGLVQPGGSLRLSCAASGTLFKINAMGWYRQAPGKR |
| | | RELVALITSSDTTDYAESVEGRFTISRDNTWNAVYLQMNSLKPED |
| | | TAVYYCHSDHYSMGVPEKRVILYGQGTLVTVSSAAAEQKLISEED |
| | | LNGAAHHHHHH |
| HER3MS00073 | 246 | EVQLVESGGGLVQPGGSLRLSCAASGTLFKINAMGWYRQAPGKR |
| | | RELVALITSSDTTDYAESVEGRFTISRDNTWNAVYLQMNSLKPED |
| | | TAVYYCHSDHYSMGVPEKRVIDYGQGTLVTVSSAAAEQKLISEED |
| | | LNGAAHHHHHH |
| HER3MS00074 | 247 | EVQLVESGGGLVQPGGSLRLSCAASGTLFKINAMGWYRQAPGKR |
| | | RELVALITSSDTTDYAESVEGRFTISRDNTWNAVYLQMNSLKPED |
| | | TAVYYCHSDHYSMGVPEKRVIEYGQGTLVTVSSAAAEQKLISEED |
| | | LNGAAHHHHHH |
| HER3MS00076 | 248 | EVQLVESGGGLVQPGGSLRLSCAASGSIGGLNAMAWYRQAPGKE |
| | | RELVAGIFGVGSTRYADSVKGRFTISRDISKNTVFLQMNSLRSEDT |
| | | AVYYCRMSSVTRGSSDYWGQGTLVTVSSAAAEQKLISEEDLNGA |
| | | AHHHHHH |
| HER3MS00077 | 249 | EVQLVESGGGLVQPGGSLRLSCAASGSIGGLNAMAWYRQAPGKE |
| | | RELVAGIFGVGSTRYADSVKGRFTISRDNSKNTVFLQMNSLRSED |
| | | TAVYYCRMSSVTRGSSDYWGQGTLVTVSSAAAEQKLISEEDLNG |
| | | AAHHHHHH |
| HER3MS00078 | 250 | EVQLVESGGGLVQPGGSLRLSCAASGSIGGLNAMAWYRQAPGKE |
| | | RELVAGIFGVGSTRYADSVKGRFTISRDISKNTVYLQMNSLRSEDT |
| | | AVYYCRMSSVTRGSSDYWGQGTLVTVSSAAAEQKLISEEDLNGA |
| | | AHHHHHH |
| HER3MS00079 | 251 | EVQLVESGGGLVQPGGSLRLSCAASGSIGGLNAMAWYRQAPGKE |
| | | RELVAGIFGVGSTRYADSVKGRFTISRDISKNTVFLQMNSLRSEDT |
| | | AVYYCAMSSVTRGSSDYWGQGTLVTVSSAAAEQKLISEEDLNGA |
| | | AHHHHHH |
| HER3MS00080 | 252 | EVQLVESGGGLVQPGGSLRLSCAASGSIGGLNAMAWYRQAPGKE |
| | | RELVAGIFGVGSTRYADSVKGRFTISRDNSKNTVYLQMNSLRSED |
| | | TAVYYCRMSSVTRGSSDYWGQGTLVTVSSAAAEQKLISEEDLNG |
| | | AAHHHHHH |
| HER3MS00081 | 253 | EVQLVESGGGLVQPGGSLRLSCAASGSIGGLNAMAWYRQAPGKE |
| | | RELVAGIFGVGSTRYADSVKGRFTISRDNSKNTVFLQMNSLRSED |
| | | TAVYYCAMSSVTRGSSDYWGQGTLVTVSSAAAEQKLISEEDLNG |
| | | AAHHHHHH |
| HER3MS00082 | 254 | EVQLVESGGGLVQPGGSLRLSCAASGSIGGLNAMAWYRQAPGKE |
| | | RELVAGIFGVGSTRYADSVKGRFTISRDISKNTVYLQMNSLRSEDT |
| | | AVYYCAMSSVTRGSSDYWGQGTLVTVSSAAAEQKLISEEDLNGA |
| | | AHHHHHH |
| HER3MS00083 | 255 | EVQLVESGGGLVQPGGSLRLSCAASGSIGGLNAMAWYRQAPGKE |
| | | RELVAGIFGVGSTRYADSVKGRFTISRDNSKNTVYLQMNSLRSED |
| | | TAVYYCAMSSVTRGSSDYWGQGTLVTVSSAAAEQKLISEEDLNG |
| | | AAHHHHHH |
| HER3MS00084 | 256 | EVQLVESGGGLVQPGGSLRLSCAASGSIGGLNAMAWYRQAPGKE |
| | | RELVAGIFGVGSTRYADSVKGRFTISRDISKNTVFLQMNSLRPEDT |
| | | AVYYCRMSSVTRGSSDYWGQGTLVTVSSAAAEQKLISEEDLNGA |
| | | AHHHHHH |
| HER3MS00085 | 257 | EVQLVESGGGLVQPGGSLRLSCAASGSIGGLNAMAWYRQAPGKE |
| | | RELVAGIFGVGSTRYADSVKGRFTISRDISKNTVFLQMNSLRAEDT |
| | | AVYYCRMSSVTRGSSDYWGQGTLVTVSSAAAEQKLISEEDLNGA |
| | | AHHHHHH |
| HER3MS00088 | 258 | EVQLVESGGGLVQAGGSLRLSCAASGRTYYLNAMGWFRQGPGK |
| | | DREFVAAIDWSYGNKDYADSVKGRFTISRDNAKNTVYLQMNSLK |
| | | PEDTAVYYCAADTPPWGPMIYIESYDSWGQGTLVTVSSAAAEQK |
| | | LISEEDLNGAAHHHHHH |
| HER3MS00089 | 259 | EVQLVESGGGLVQAGGSLRLSCAASGRTYYLNAMGWFRQGPGK |
| | | DREFVAAIDWSEGNKDYADSVKGRFTISRDNAKNTVYLQMNSLK |
| | | PEDTAVYYCAADTPPWGPMIYIESYDSWGQGTLVTVSSAAAEQK |
| | | LISEEDLNGAAHHHHHH |
| HER3MS00090 | 260 | EVQLVESGGGLVQAGGSLRLSCAASGRTYYLNAMGWFRQGPGK |
| | | DREFVAAIDWSDANKDYADSVKGRFTISRDNAKNTVYLQMNSLK |
| | | PEDTAVYYCAADTPPWGPMIYIESYDSWGQGTLVTVSSAAAEQK |
| | | LISEEDLNGAAHHHHHH |
| HER3MS00091 | 261 | EVQLVESGGGLVQAGGSLRLSCAASGRTYYLNAMGWFRQGPGK |
| | | DREFVAAIDWSDGNKDYADSVKGRFTISRDNAKNTVYLQMNSLK |
| | | PEDTAVYYCAADTPPWGPFIYIESYDSWGQGTLVTVSSAAAEQKL |
| | | ISEEDLNGAAHHHHHH |
| HER3MS00092 | 262 | EVQLVESGGGLVQAGGSLRLSCAASGRTYYLNAMGWFRQGPGK |
| | | DREFVAAIDWSDGNKDYADSVKGRFTISRDNAKNTVYLQMNSLK |
| | | PEDTAVYYCAADTPPWGPYIYIESYDSWGQGTLVTVSSAAAEQKL |
| | | ISEEDLNGAAHHHHHH |
| HER3MS00093 | 263 | EVQLVESGGGLVQAGGSLRLSCAASGRTYYLNAMGWFRQGPGK |
| | | DREFVAAIDWSDGNKDYADSVKGRFTISRDNAKNTVYLQMNSLK |
| | | PEDTAVYYCAADTPPWGPLIYIESYDSWGQGTLVTVSSAAAEQKL |
| | | ISEEDLNGAAHHHHHH |
| HER3MS00094 | 264 | EVQLVESGGGLVQAGGSLRLSCAASGRTYYLNAMGWFRQGPGK |
| | | DREFVAAIDWSDGNKDYADSVKGRFTISRDNAKNTVYLQMNSLK |
| | | PEDTAVYYCAADTPPWGPMIYIESYQSWGQGTLVTVSSAAAEQK |
| | | LISEEDLNGAAHHHHHH |
| HER3MS00095 | 265 | EVQLVESGGGLVQAGGSLRLSCAASGRTYYLNAMGWFRQGPGK |
| | | DREFVAAIDWSDGNKDYADSVKGRFTISRDNAKNTVYLQMNSLK |
| | | PEDTAVYYCAADTPPWGPMIYIESYESWGQGTLVTVSSAAAEQK |
| | | LISEEDLNGAAHHHHHH |
| HER3MS00096 | 266 | EVQLVESGGGLVQAGGSLRLSCAASGRTYYLNAMGWFRQGPGK |
| | | DREFVAAIDWSDGNKDYADSVKGRFTISRDNAKNTVYLQMNSLK |
| | | PEDTAVYYCAADTPPWGPMIYIESYDDWGQGTLVTVSSAAAEQK |
| | | LISEEDLNGAAHHHHHH |
| HER3MS00097 | 267 | EVQLVESGGGLVQAGGSLRLSCAASGRTYYLNAMGWFRQGPGK |
| | | DREFVAAIDWSDGNKDYADSVKGRFTISRDNAKNTVYLQMNSLK |
| | | PEDTAVYYCAADTPPWGPMIYIESYDEWGQGTLVTVSSAAAEQK |
| | | LISEEDLNGAAHHHHHH |
| HER3MS00098 | 268 | EVQLVESGGGLVQAGGSLRLSCAASGRTYYLNAMGWFRQGPGK |
| | | DREFVAAIDWSDGNKDYADSVKGRFTISRDNAKNTVYLQMNSLK |
| | | PEDTAVYYCAADTPPWGPMIYIESYDTWGQGTLVTVSSAAAEQK |
| | | LISEEDLNGAAHHHHHH |
| HER3MS00118 | 269 | EVQLVESGGGLVQPGGSLRLSCAASGSIGGLNAMAWYRQAPGKE |
| | | RELVAGIFGVGSTRYADSVKGRFTISRDNSKNTVYLQMNSLRAED |
| | | TAVYYCRMSSVTRGSSDYWGQGTLVTVSSAAAEQKLISEEDLNG |
| | | AAHHHHHH |
| HER3MS00119 | 270 | EVQLVESGGGLVQPGGSLRLSCAASGSIGGLNAMAWYRQAPGKE |
| | | RELVAGIFGVGSTRYADSVKGRFTISRDNSKNTVYLQMNSLRPED |
| | | TAVYYCRMSSVTRGSSDYWGQGTLVTVSSAAAEQKLISEEDLNG |
| | | AAHHHHHH |
| HER3MS00120 | 271 | DVQLVESGGGLVQPGGSLRLSCAASGSIGGLNAMAWYRQAPGKE |
| | | RELVAGIFGVGSTRYADSVKGRFTISRDNSKNTVYLQMNSLRAED |
| | | TAVYYCRMSSVTRGSSDYWGQGTLVTVSSAAAEQKLISEEDLNG |
| | | AAHHHHHH |
| HER3MS00121 | 272 | DVQLVESGGGLVQPGGSLRLSCAASGSIGGLNAMAWYRQAPGKE |
| | | RELVAGIFGVGSTRYADSVKGRFTISRDNSKNTVYLQMNSLRPED |
| | | TAVYYCRMSSVTRGSSDYWGQGTLVTVSSAAAEQKLISEEDLNG |
| | | AAHHHHHH |
| HER3MS00123 | 273 | EVQLVESGGGLVQPGGSLRLSCAASGSIFRINAMAWYRQAPGKQ |
| | | RELVAEITAGGSTNYADSVKGRFTISRDNSWNTLYLQMNSLRPED |
| | | TAVYYCNLDHYTTWDRRSAYWGQGTLVTVSSAAAEQKLISEEDL |
| | | NGAAHHHHHH |
| HER3MS00124 | 274 | EVQLVESGGGLVQPGGSLRLSCAASGSIFRINAMAWYRQAPGKQ |
| | | RELVAEITAGGSTNYADSVKGRFTISRDNSWNTLYLQMNSLRAED |
| | | TAVYYCNLDHYTTWDRRSAYWGQGTLVTVSSAAAEQKLISEEDL |
| | | NGAAHHHHHH |
| HER3MS00125 | 275 | EVQLVESGGGLVQPGGSLRLSCAASGTLFKINAMGWYRQAPGKQ |
| | | RELVALITSSDTTDYAEDVKGRFTISRDNSWNTVYLQMNSLRPED |
| | | TAVYYCHSDHYSLGVPEKRVILYGQGTLVTVSSAAAEQKLISEED |
| | | LNGAAHHHHHH |
| HER3MS00127 | 276 | DVQLVESGGGLVQPGGSLRLSCAASGSIFRINAMAWYRQAPGKQ |
| | | RELVAEITAGGSTNYADSVKGRFTISRDNSWNTLYLQMNSLRPED |
| | | TAVYYCNLDHYTTWDRRSAYWGQGTLVTVSSAAAEQKLISEEDL |
| | | NGAAHHHHHH |
| HER3MS00128 | 277 | DVQLVESGGGLVQPGGSLRLSCAASGSIFRINAMAWYRQAPGKQ |
| | | RELVAEITAGGSTNYADSVKGRFTISRDNSWNTLYLQMNSLRAED |
| | | TAVYYCNLDHYTTWDRRSAYWGQGTLVTVSSAAAEQKLISEEDL |
| | | NGAAHHHHHH |
| HER3MS00129 | 278 | EVQLVESGGGLVQPGGSLRLSCAASGFTFSSYPMSWVRQAPGKGP |
| | | EWVSTVSPGGITTSYADSVKGRFTISRDNSKNTLYLQMNSLRPEDT |
| | | AVYYCLRDLGNRGQGTLVTVSSAAAEQKLISEEDLNGAAHHHHHH |
| HER3MS00130 | 279 | EVQLVESGGGLVQPGGSLRLSCAASGFTFSSYPMSWVRQAPGKGP |
| | | AWVSTVSPGGITTSYADSVKGRFTISRDNSKNTLYLQMNSLRPED |
| | | TAVYYCLRDLGNRGQGTLVTVSSAAAEQKLISEEDLNGAAHHHH |
| | | HH |
| HER3MS00131 | 280 | EVQLVESGGGLVQPGGSLRLSCAASGFTFSSYPMSWVRQAPGKGP |
| | | EWVSTVSPGGITTSYADSVKGRFTISRDNSKNTLYLQMNSLRPEDT |
| | | AVYYCLRDLSNRGQGTLVTVSSAAAEQKLISEEDLNGAAHHHHHH |
| HER3MS00132 | 281 | EVQLVESGGGLVQPGGSLRLSCAASGFTFSSYPMSWVRQAPGKGP |
| | | AWVSTVSPGGITTSYADSVKGRFTISRDNSKNTLYLQMNSLRPED |
| | | TAVYYCLRDLSNRGQGTLVTVSSAAAEQKLISEEDLNGAAHHHH |
| | | HH |
| HER3MS00135 | 282 | DVQLVESGGGLVQPGGSLRLSCAASGSIGGLNAMAWYRQAPGKE |
| | | RELVAGIFGVGSTRYADSVKGRFTISRDNSKNTVYLQMNSLRPED |
| | | TAVYYCRMSSVTRGSSDYWGQGTLVTVSSGGGGSGGGSEVQLVE |
| | | SGGGLVQPGNSLRLSCAASGFTFSSFGMSWVRQAPGKGLEWVSSI |
| | | SGSGSDTLYADSVKGRFTISRDNAKTTLYLQMNSLRPEDTAVYYC |
| | | TIGGSLSRSSQGTLVTVSSGGGGSGGGSEVQLVESGGGLVQPGGS |
| | | LRLSCAASGRTYYLNAMGWFRQAPGKEREFVAAIDWSEGNKDY |
| | | ADSVKGRFTISRDNSKNTVYLQMNSLRPEDTAVYYCAADTPPWG |
| | | PLIYIESYDSWGQGTLVTVSS |
| HER3MS00136 | 283 | DVQLVESGGGLVQPGGSLRLSCAASGSIGGLNAMAWYRQAPGKE |
| | | RELVAGIFGVGSTRYADSVKGRFTISRDNSKNTVYLQMNSLRPED |
| | | TAVYYCRMSSVTRGSSDYWGQGTLVTVSSGGGGSGGGGSGGGG |
| | | SGGGGSGGGGSGGGGSGGGGSEVQLVESGGGLVQPGNSLRLSCA |
| | | ASGFTFSSFGMSWVRQAPGKGLEWVSSISGSGSDTLYADSVKGRF |
| | | TISRDNAKTTLYLQMNSLRPEDTAVYYCTIGGSLSRSSQGTLVTVS |
| | | SGGGGSGGGGSGGGGSGGGGSGGGGSGGGGSGGGGSEVQLVES |
| | | GGGLVQPGGSLRLSCAASGRTYYLNAMGWFRQAPGKEREFVAAI |
| | | DWSEGNKDYADSVKGRFTISRDNSKNTVYLQMNSLRPEDTAVYY |
| | | CAADTPPWGPLIYIESYDSWGQGTLVTVSS |
| HER3MS00137 | 284 | DVQLVESGGGLVQPGGSLRLSCAASGSIGGLNAMAWYRQAPGKE |
| | | RELVAGIFGVGSTRYADSVKGRFTISRDNSKNTVYLQMNSLRPED |
| | | TAVYYCRMSSVTRGSSDYWGQGTLVTVSSGGGGSGGGSEVQLVE |
| | | SGGGLVQPGGSLRLSCAASGRTYYLNAMGWFRQAPGKEREFVAA |
| | | IDWSEGNKDYADSVKGRFTISRDNSKNTVYLQMNSLRPEDTAVY |
| | | YCAADTPPWGPLIYIESYDSWGQGTLVTVSSGGGGSGGGSEVQLV |
| | | ESGGGLVQPGNSLRLSCAASGFTFSSFGMSWVRQAPGKGLEWVS |
| | | SISGSGSDTLYADSVKGRFTISRDNAKTTLYLQMNSLRPEDTAVY |
| | | YCTIGGSLSRSSQGTLVTVSS |
| HER3MS00138 | 285 | DVQLVESGGGLVQPGGSLRLSCAASGSIGGLNAMAWYRQAPGKE |
| | | RELVAGIFGVGSTRYADSVKGRFTISRDNSKNTVYLQMNSLRPED |
| | | TAVYYCRMSSVTRGSSDYWGQGTLVTVSSGGGGSGGGGSGGGG |
| | | SGGGGSGGGGSGGGGSGGGGSEVQLVESGGGLVQPGGSLRLSCA |
| | | ASGRTYYLNAMGWFRQAPGKEREFVAAIDWSEGNKDYADSVKG |
| | | RFTISRDNSKNTVYLQMNSLRPEDTAVYYCAADTPPWGPLIYIESY |
| | | DSWGQGTLVTVSSGGGGSGGGGSGGGGSGGGGSGGGGSGGGGS |
| | | GGGGSEVQLVESGGGLVQPGNSLRLSCAASGFTFSSFGMSWVRQ |
| | | APGKGLEWVSSISGSGSDTLYADSVKGRFTISRDNAKTTLYLQMN |
| | | SLRPEDTAVYYCTIGGSLSRSSQGTLVTVSS |
| HER3MS00139 | 286 | DVQLVESGGGLVQPGGSLRLSCAASGSIGGLNAMAWYRQAPGKE |
| | | RELVAGIFGVGSTRYADSVKGRFTISRDNSKNTVYLQMNSLRPED |
| | | TAVYYCRMSSVTRGSSDYWGQGTLVTVSSGGGGSGGGSEVQLVE |
| | | SGGGLVQPGNSLRLSCAASGFTFSSFGMSWVRQAPGKGLEWVSSI |
| | | SGSGSDTLYADSVKGRFTISRDNAKTTLYLQMNSLRPEDTAVYYC |
| | | TIGGSLSRSSQGTLVTVSSGGGGSGGGSEVQLVESGGGLVQPGGS |
| | | LRLSCAASGSIFRINAMAWYRQAPGKQRELVAEITAGGSTNYADS |
| | | VKGRFTISRDNSWNTLYLQMNSLRPEDTAVYYCNLDHYTTWDRR |
| | | SAYWGQGTLVTVSS |
| HER3MS00140 | 287 | DVQLVESGGGLVQPGGSLRLSCAASGSIGGLNAMAWYRQAPGKE |
| | | RELVAGIFGVGSTRYADSVKGRFTISRDNSKNTVYLQMNSLRPED |
| | | TAVYYCRMSSVTRGSSDYWGQGTLVTVSSGGGGSGGGGSGGGG |
| | | SGGGGSGGGGSGGGGSGGGGSEVQLVESGGGLVQPGNSLRLSCA |
| | | ASGFTFSSFGMSWVRQAPGKGLEWVSSISGSGSDTLYADSVKGRF |
| | | TISRDNAKTTLYLQMNSLRPEDTAVYYCTIGGSLSRSSQGTLVTVS |
| | | SGGGGSGGGGSGGGGSGGGGSGGGGSGGGGSGGGGSEVQLVES |
| | | GGGLVQPGGSLRLSCAASGSIFRINAMAWYRQAPGKQRELVAEIT |
| | | AGGSTNYADSVKGRFTISRDNSWNTLYLQMNSLRPEDTAVYYCN |
| | | LDHYTTWDRRSAYWGQGTLVTVSS |
| HER3MS00141 | 288 | DVQLVESGGGLVQPGGSLRLSCAASGSIGGLNAMAWYRQAPGKE |
| | | RELVAGIFGVGSTRYADSVKGRFTISRDNSKNTVYLQMNSLRPED |
| | | TAVYYCRMSSVTRGSSDYWGQGTLVTVSSGGGGSGGGSEVQLVE |
| | | SGGGLVQPGGSLRLSCAASGSIFRINAMAWYRQAPGKQRELVAEI |
| | | TAGGSTNYADSVKGRFTISRDNSWNTLYLQMNSLRPEDTAVYYC |
| | | NLDHYTTWDRRSAYWGQGTLVTVSSGGGGSGGGSEVQLVESGG |
| | | GLVQPGNSLRLSCAASGFTFSSFGMSWVRQAPGKGLEWVSSISGS |
| | | GSDTLYADSVKGRFTISRDNAKTTLYLQMNSLRPEDTAVYYCTIG |
| | | GSLSRSSQGTLVTVSS |
| HER3MS00142 | 289 | DVQLVESGGGLVQPGGSLRLSCAASGSIGGLNAMAWYRQAPGKE |
| | | RELVAGIFGVGSTRYADSVKGRFTISRDNSKNTVYLQMNSLRPED |
| | | TAVYYCRMSSVTRGSSDYWGQGTLVTVSSGGGGSGGGGSGGGG |
| | | SGGGGSGGGGSGGGGSGGGGSEVQLVESGGGLVQPGGSLRLSCA |
| | | ASGSIFRINAMAWYRQAPGKQRELVAEITAGGSTNYADSVKGRFT |
| | | ISRDNSWNTLYLQMNSLRPEDTAVYYCNLDHYTTWDRRSAYWG |
| | | QGTLVTVSSGGGGSGGGGSGGGGSGGGGSGGGGSGGGGSGGGG |
| | | SEVQLVESGGGLVQPGNSLRLSCAASGFTFSSFGMSWVRQAPGKG |
| | | LEWVSSISGSGSDTLYADSVKGRFTISRDNAKTTLYLQMNSLRPED |
| | | TAVYYCTIGGSLSRSSQGTLVTVSS |
| HER3MS00143 | 290 | DVQLVESGGGLVQPGGSLRLSCAASGSIGGLNAMAWYRQAPGKE |
| | | RELVAGIFGVGSTRYADSVKGRFTISRDNSKNTVYLQMNSLRPED |
| | | TAVYYCRMSSVTRGSSDYWGQGTLVTVSSGGGGSGGGSEVQLVE |
| | | SGGGLVQPGNSLRLSCAASGFTFSSFGMSWVRQAPGKGLEWVSSI |
| | | SGSGSDTLYADSVKGRFTISRDNAKTTLYLQMNSLRPEDTAVYYC |
| | | TIGGSLSRSSQGTLVTVSSGGGGSGGGSEVQLVESGGGLVQPGGS |
| | | LRLSCAASGTLFKINAMGWYRQAPGKRRELVALITSSDTTDYAED |
| | | VKGRFTISRDNSWNTVYLQMNSLRPEDTAVYYCHSDHYSLGVPE |
| | | KRVILYGQGTLVTVSS |
| HER3MS00144 | 291 | DVQLVESGGGLVQPGGSLRLSCAASGSIGGLNAMAWYRQAPGKE |
| | | RELVAGIFGVGSTRYADSVKGRFTISRDNSKNTVYLQMNSLRPED |
| | | TAVYYCRMSSVTRGSSDYWGQGTLVTVSSGGGGSGGGGSGGGG |
| | | SGGGGSGGGGSGGGGSGGGGSEVQLVESGGGLVQPGNSLRLSCA |
| | | ASGFTFSSFGMSWVRQAPGKGLEWVSSISGSGSDTLYADSVKGRF |
| | | TISRDNAKTTLYLQMNSLRPEDTAVYYCTIGGSLSRSSQGTLVTVS |
| | | SGGGGSGGGGSGGGGSGGGGSGGGGSGGGGSGGGGSEVQLVES |
| | | GGGLVQPGGSLRLSCAASGTLFKINAMGWYRQAPGKRRELVALI |
| | | TSSDTTDYAEDVKGRFTISRDNSWNTVYLQMNSLRPEDTAVYYC |
| | | HSDHYSLGVPEKRVILYGQGTLVTVSS |
| HER3MS00145 | 292 | DVQLVESGGGLVQPGGSLRLSCAASGSIGGLNAMAWYRQAPGKE |
| | | RELVAGIFGVGSTRYADSVKGRFTISRDNSKNTVYLQMNSLRPED |
| | | TAVYYCRMSSVTRGSSDYWGQGTLVTVSSGGGGSGGGSEVQLVE |
| | | SGGGLVQPGGSLRLSCAASGTLFKINAMGWYRQAPGKRRELVALI |
| | | TSSDTTDYAEDVKGRFTISRDNSWNTVYLQMNSLRPEDTAVYYC |
| | | HSDHYSLGVPEKRVILYGQGTLVTVSSGGGGSGGGSEVQLVESGG |
| | | GLVQPGNSLRLSCAASGFTFSSFGMSWVRQAPGKGLEWVSSISGS |
| | | GSDTLYADSVKGRFTISRDNAKTTLYLQMNSLRPEDTAVYYCTIG |
| | | GSLSRSSQGTLVTVSS |
| HER3MS00146 | 293 | DVQLVESGGGLVQPGGSLRLSCAASGSIGGLNAMAWYRQAPGKE |
| | | RELVAGIFGVGSTRYADSVKGRFTISRDNSKNTVYLQMNSLRPED |
| | | TAVYYCRMSSVTRGSSDYWGQGTLVTVSSGGGGSGGGGSGGGG |
| | | SGGGGSGGGGSGGGGSGGGGSEVQLVESGGGLVQPGGSLRLSCA |
| | | ASGTLFKINAMGWYRQAPGKRRELVALITSSDTTDYAEDVKGRFT |
| | | ISRDNSWNTVYLQMNSLRPEDTAVYYCHSDHYSLGVPEKRVILY |
| | | GQGTLVTVSSGGGGSGGGGSGGGGSGGGGSGGGGSGGGGSGGG |
| | | GSEVQLVESGGGLVQPGNSLRLSCAASGFTFSSFGMSWVRQAPGK |
| | | GLEWVSSISGSGSDTLYADSVKGRFTISRDNAKTTLYLQMNSLRPE |
| | | DTAVYYCTIGGSLSRSSQGTLVTVSS |
| HER3MS00147 | 294 | EVQLVESGGGLVQPGGSLRLSCAASGFTFSSYPMSWVRQAPGKGP |
| | | EWVSTVSPGGITTSYADSVKGRFTISRDNSKNTLYLQMNSLRPEDT |
| | | AVYYCLRDLGNRGQGTLVTVSSGGGGSGGGGSGGGGSGGGGSG |
| | | GGGSGGGGSGGGGSEVQLVESGGGLVQPGNSLRLSCAASGFTFSS |
| | | FGMSWVRQAPGKGLEWVSSISGSGSDTLYADSVKGRFTISRDNAK |
| | | TTLYLQMNSLRPEDTAVYYCTIGGSLSRSSQGTLVTVSSGGGGSG |
| | | GGGSGGGGSGGGGSGGGGSGGGGSGGGGSEVQLVESGGGLVQP |
| | | GGSLRLSCAASGSIFRINAMAWYRQAPGKQRELVAEITAGGSTNY |
| | | ADSVKGRFTISRDNSWNTLYLQMNSLRPEDTAVYYCNLDHYTTW |
| | | DRRSAYWGQGTLVTVSS |
| HER3MS00148 | 295 | EVQLVESGGGLVQPGGSLRLSCAASGFTFSSYPMSWVRQAPGKGP |
| | | AWVSTVSPGGITTSYADSVKGRFTISRDNSKNTLYLQMNSLRPED |
| | | TAVYYCLRDLGNRGQGTLVTVSSGGGGSGGGGSGGGGSGGGGS |
| | | GGGGSGGGGSGGGGSEVQLVESGGGLVQPGNSLRLSCAASGFTFS |
| | | SFGMSWVRQAPGKGLEWVSSISGSGSDTLYADSVKGRFTISRDNA |
| | | KTTLYLQMNSLRPEDTAVYYCTIGGSLSRSSQGTLVTVSSGGGGS |
| | | GGGGSGGGGSGGGGSGGGGSGGGGSGGGGSEVQLVESGGGLVQ |
| | | PGGSLRLSCAASGSIFRINAMAWYRQAPGKQRELVAEITAGGSTN |
| | | YADSVKGRFTISRDNSWNTLYLQMNSLRPEDTAVYYCNLDHYTT |
| | | WDRRSAYWGQGTLVTVSS |
| HER3MS00149 | 296 | EVQLVESGGGLVQPGGSLRLSCAASGFTFSSYPMSWVRQAPGKGP |
| | | EWVSTVSPGGITTSYADSVKGRFTISRDNSKNTLYLQMNSLRPEDT |
| | | AVYYCLRDLGNRGQGTLVTVSSGGGGSGGGGSGGGGSGGGGSG |
| | | GGGSGGGGSGGGGSEVQLVESGGGLVQPGGSLRLSCAASGSIFRI |
| | | NAMAWYRQAPGKQRELVAEITAGGSTNYADSVKGRFTISRDNSW |
| | | NTLYLQMNSLRPEDTAVYYCNLDHYTTWDRRSAYWGQGTLVTV |
| | | SSGGGGSGGGGSGGGGSGGGGSGGGGSGGGGSGGGGSEVQLVES |
| | | GGGLVQPGNSLRLSCAASGFTFSSFGMSWVRQAPGKGLEWVSSIS |
| | | GSGSDTLYADSVKGRFTISRDNAKTTLYLQMNSLRPEDTAVYYCT |
| | | IGGSLSRSSQGTLVTVSS |
| HER3MS00150 | 297 | EVQLVESGGGLVQPGGSLRLSCAASGFTFSSYPMSWVRQAPGKGP |
| | | AWVSTVSPGGITTSYADSVKGRFTISRDNSKNTLYLQMNSLRPED |
| | | TAVYYCLRDLGNRGQGTLVTVSSGGGGSGGGGSGGGGSGGGGS |
| | | GGGGSGGGGSGGGGSEVQLVESGGGLVQPGGSLRLSCAASGSIFR |
| | | INAMAWYRQAPGKQRELVAEITAGGSTNYADSVKGRFTISRDNS |
| | | WNTLYLQMNSLRPEDTAVYYCNLDHYTTWDRRSAYWGQGTLV |
| | | TVSSGGGGSGGGGSGGGGSGGGGSGGGGSGGGGSGGGGSEVQL |
| | | VESGGGLVQPGNSLRLSCAASGFTFSSFGMSWVRQAPGKGLEWV |
| | | SSISGSGSDTLYADSVKGRFTISRDNAKTTLYLQMNSLRPEDTAVY |
| | | YCTIGGSLSRSSQGTLVTVSS |
| HER3MS00151 | 298 | DVQLVESGGGLVQPGGSLRLSCAASGSIFRINAMAWYRQAPGKQ |
| | | RELVAEITAGGSTNYADSVKGRFTISRDNSWNTLYLQMNSLRPED |
| | | TAVYYCNLDHYTTWDRRSAYWGQGTLVTVSSGGGGSGGGGSGG |
| | | GGSGGGGSGGGGSGGGGSGGGGSEVQLVESGGGLVQPGNSLRLS |
| | | CAASGFTFSSFGMSWVRQAPGKGLEWVSSISGSGSDTLYADSVKG |
| | | RFTISRDNAKTTLYLQMNSLRPEDTAVYYCTIGGSLSRSSQGTLVT |
| | | VSSGGGGSGGGGSGGGGSGGGGSGGGGSGGGGSGGGGSEVQLV |
| | | ESGGGLVQPGGSLRLSCAASGFTFSSYPMSWVRQAPGKGPEWVS |
| | | TVSPGGITTSYADSVKGRFTISRDNSKNTLYLQMNSLRPEDTAVY |
| | | YCLRDLGNRGQGTLVTVSS |
| HER3MS00152 | 299 | DVQLVESGGGLVQPGGSLRLSCAASGSIFRINAMAWYRQAPGKQ |
| | | RELVAEITAGGSTNYADSVKGRFTISRDNSWNTLYLQMNSLRPED |
| | | TAVYYCNLDHYTTWDRRSAYWGQGTLVTVSSGGGGSGGGGSGG |
| | | GGSGGGGSGGGGSGGGGSGGGGSEVQLVESGGGLVQPGNSLRLS |
| | | CAASGFTFSSFGMSWVRQAPGKGLEWVSSISGSGSDTLYADSVKG |
| | | RFTISRDNAKTTLYLQMNSLRPEDTAVYYCTIGGSLSRSSQGTLVT |
| | | VSSGGGGSGGGGSGGGGSGGGGSGGGGSGGGGSGGGGSEVQLV |
| | | ESGGGLVQPGGSLRLSCAASGFTFSSYPMSWVRQAPGKGPAWVS |
| | | TVSPGGITTSYADSVKGRFTISRDNSKNTLYLQMNSLRPEDTAVY |
| | | YCLRDLGNRGQGTLVTVSS |
| HER3MS00153 | 300 | DVQLVESGGGLVQPGGSLRLSCAASGSIFRINAMAWYRQAPGKQ |
| | | RELVAEITAGGSTNYADSVKGRFTISRDNSWNTLYLQMNSLRPED |
| | | TAVYYCNLDHYTTWDRRSAYWGQGTLVTVSSGGGGSGGGGSGG |
| | | GGSGGGGSGGGGSGGGGSGGGGSEVQLVESGGGLVQPGGSLRLS |
| | | CAASGFTFSSYPMSWVRQAPGKGPEWVSTVSPGGITTSYADSVKG |
| | | RFTISRDNSKNTLYLQMNSLRPEDTAVYYCLRDLGNRGQGTLVTV |
| | | SSGGGGSGGGGSGGGGSGGGGSGGGGSGGGGSGGGGSEVQLVES |
| | | GGGLVQPGNSLRLSCAASGFTFSSFGMSWVRQAPGKGLEWVSSIS |
| | | GSGSDTLYADSVKGRFTISRDNAKTTLYLQMNSLRPEDTAVYYCT |
| | | IGGSLSRSSQGTLVTVSS |
| HER3MS00154 | 301 | DVQLVESGGGLVQPGGSLRLSCAASGSIFRINAMAWYRQAPGKQ |
| | | RELVAEITAGGSTNYADSVKGRFTISRDNSWNTLYLQMNSLRPED |
| | | TAVYYCNLDHYTTWDRRSAYWGQGTLVTVSSGGGGSGGGGSGG |
| | | GGSGGGGSGGGGSGGGGSGGGGSEVQLVESGGGLVQPGGSLRLS |
| | | CAASGFTFSSYPMSWVRQAPGKGPAWVSTVSPGGITTSYADSVK |
| | | GRFTISRDNSKNTLYLQMNSLRPEDTAVYYCLRDLGNRGQGTLVT |
| | | VSSGGGGSGGGGSGGGGSGGGGSGGGGSGGGGSGGGGSEVQLV |
| | | ESGGGLVQPGNSLRLSCAASGFTFSSFGMSWVRQAPGKGLEWVS |
| | | SISGSGSDTLYADSVKGRFTISRDNAKTTLYLQMNSLRPEDTAVY |
| | | YCTIGGSLSRSSQGTLVTVSS |
| HER3MS00155 | 302 | EVQLVESGGGLVQPGGSLRLSCAASGFTFSSYPMSWVRQAPGKGP |
| | | EWVSTVSPGGITTSYADSVKGRFTISRDNSKNTLYLQMNSLRPEDT |
| | | AVYYCLRDLGNRGQGTLVTVSSGGGGSGGGGSGGGGSGGGGSG |
| | | GGGSGGGGSGGGGSEVQLVESGGGLVQPGNSLRLSCAASGFTFSS |
| | | FGMSWVRQAPGKGLEWVSSISGSGSDTLYADSVKGRFTISRDNAK |
| | | TTLYLQMNSLRPEDTAVYYCTIGGSLSRSSQGTLVTVSSGGGGSG |
| | | GGGSGGGGSGGGGSGGGGSGGGGSGGGGSEVQLVESGGGLVQP |
| | | GGSLRLSCAASGTLFKINAMGWYRQAPGKRRELVALITSSDTTDY |
| | | AEDVKGRFTISRDNSWNTVYLQMNSLRPEDTAVYYCHSDHYSLG |
| | | VPEKRVILYGQGTLVTVSS |
| HER3MS00156 | 303 | EVQLVESGGGLVQPGGSLRLSCAASGFTFSSYPMSWVRQAPGKGP |
| | | AWVSTVSPGGITTSYADSVKGRFTISRDNSKNTLYLQMNSLRPED |
| | | TAVYYCLRDLGNRGQGTLVTVSSGGGGSGGGGSGGGGSGGGGS |
| | | GGGGSGGGGSGGGGSEVQLVESGGGLVQPGNSLRLSCAASGFTFS |
| | | SFGMSWVRQAPGKGLEWVSSISGSGSDTLYADSVKGRFTISRDNA |
| | | KTTLYLQMNSLRPEDTAVYYCTIGGSLSRSSQGTLVTVSSGGGGS |
| | | GGGGSGGGGSGGGGSGGGGSGGGGSGGGGSEVQLVESGGGLVQ |
| | | PGGSLRLSCAASGTLFKINAMGWYRQAPGKRRELVALITSSDTTD |
| | | YAEDVKGRFTISRDNSWNTVYLQMNSLRPEDTAVYYCHSDHYSL |
| | | GVPEKRVILYGQGTLVTVSS |
| HER3MS00157 | 304 | EVQLVESGGGLVQPGGSLRLSCAASGFTFSSYPMSWVRQAPGKGP |
| | | EWVSTVSPGGITTSYADSVKGRFTISRDNSKNTLYLQMNSLRPEDT |
| | | AVYYCLRDLGNRGQGTLVTVSSGGGGSGGGGSGGGGSGGGGSG |
| | | GGGSGGGGSGGGGSEVQLVESGGGLVQPGGSLRLSCAASGTLFKI |
| | | NAMGWYRQAPGKRRELVALITSSDTTDYAEDVKGRFTISRDNSW |
| | | NTVYLQMNSLRPEDTAVYYCHSDHYSLGVPEKRVILYGQGTLVT |
| | | VSSGGGGSGGGGSGGGGSGGGGSGGGGSGGGGSGGGGSEVQLV |
| | | ESGGGLVQPGNSLRLSCAASGFTFSSFGMSWVRQAPGKGLEWVS |
| | | SISGSGSDTLYADSVKGRFTISRDNAKTTLYLQMNSLRPEDTAVY |
| | | YCTIGGSLSRSSQGTLVTVSS |
| HER3MS00158 | 305 | EVQLVESGGGLVQPGGSLRLSCAASGFTFSSYPMSWVRQAPGKGP |
| | | AWVSTVSPGGITTSYADSVKGRFTISRDNSKNTLYLQMNSLRPED |
| | | TAVYYCLRDLGNRGQGTLVTVSSGGGGSGGGGSGGGGSGGGGS |
| | | GGGGSGGGGSGGGGSEVQLVESGGGLVQPGGSLRLSCAASGTLF |
| | | KINAMGWYRQAPGKRRELVALITSSDTTDYAEDVKGRFTISRDNS |
| | | WNTVYLQMNSLRPEDTAVYYCHSDHYSLGVPEKRVILYGQGTLV |
| | | TVSSGGGGSGGGGSGGGGSGGGGSGGGGSGGGGSGGGGSEVQL |
| | | VESGGGLVQPGNSLRLSCAASGFTFSSFGMSWVRQAPGKGLEWV |
| | | SSISGSGSDTLYADSVKGRFTISRDNAKTTLYLQMNSLRPEDTAVY |
| | | YCTIGGSLSRSSQGTLVTVSS |
| HER3MS00159 | 306 | EVQLVESGGGLVQPGGSLRLSCAASGTLFKINAMGWYRQAPGKR |
| | | RELVALITSSDTTDYAEDVKGRFTISRDNSWNTVYLQMNSLRPED |
| | | TAVYYCHSDHYSLGVPEKRVILYGQGTLVTVSSGGGGSGGGGSG |
| | | GGGSGGGGSGGGGSGGGGSGGGGSEVQLVESGGGLVQPGNSLRL |
| | | SCAASGFTFSSFGMSWVRQAPGKGLEWVSSISGSGSDTLYADSVK |
| | | GRFTISRDNAKTTLYLQMNSLRPEDTAVYYCTIGGSLSRSSQGTLV |
| | | TVSSGGGGSGGGGSGGGGSGGGGSGGGGSGGGGSGGGGSEVQL |
| | | VESGGGLVQPGGSLRLSCAASGFTFSSYPMSWVRQAPGKGPEWV |
| | | STVSPGGITTSYADSVKGRFTISRDNSKNTLYLQMNSLRPEDTAVY |
| | | YCLRDLGNRGQGTLVTVSS |
| HER3MS00160 | 307 | EVQLVESGGGLVQPGGSLRLSCAASGTLFKINAMGWYRQAPGKR |
| | | RELVALITSSDTTDYAEDVKGRFTISRDNSWNTVYLQMNSLRPED |
| | | TAVYYCHSDHYSLGVPEKRVILYGQGTLVTVSSGGGGSGGGGSG |
| | | GGGSGGGGSGGGGSGGGGSGGGGSEVQLVESGGGLVQPGNSLRL |
| | | SCAASGFTFSSFGMSWVRQAPGKGLEWVSSISGSGSDTLYADSVK |
| | | GRFTISRDNAKTTLYLQMNSLRPEDTAVYYCTIGGSLSRSSQGTLV |
| | | TVSSGGGGSGGGGSGGGGSGGGGSGGGGSGGGGSGGGGSEVQL |
| | | VESGGGLVQPGGSLRLSCAASGFTFSSYPMSWVRQAPGKGPAWV |
| | | STVSPGGITTSYADSVKGRFTISRDNSKNTLYLQMNSLRPEDTAVY |
| | | YCLRDLGNRGQGTLVTVSS |
| HER3MS00161 | 308 | EVQLVESGGGLVQPGGSLRLSCAASGTLFKINAMGWYRQAPGKR |
| | | RELVALITSSDTTDYAEDVKGRFTISRDNSWNTVYLQMNSLRPED |
| | | TAVYYCHSDHYSLGVPEKRVILYGQGTLVTVSSGGGGSGGGGSG |
| | | GGGSGGGGSGGGGSGGGGSGGGGSEVQLVESGGGLVQPGGSLRL |
| | | SCAASGFTFSSYPMSWVRQAPGKGPEWVSTVSPGGITTSYADSVK |
| | | GRFTISRDNSKNTLYLQMNSLRPEDTAVYYCLRDLGNRGQGTLVT |
| | | VSSGGGGSGGGGSGGGGSGGGGSGGGGSGGGGSGGGGSEVQLV |
| | | ESGGGLVQPGNSLRLSCAASGFTFSSFGMSWVRQAPGKGLEWVS |
| | | SISGSGSDTLYADSVKGRFTISRDNAKTTLYLQMNSLRPEDTAVY |
| | | YCTIGGSLSRSSQGTLVTVSS |
| HER3MS00162 | 309 | EVQLVESGGGLVQPGGSLRLSCAASGTLFKINAMGWYRQAPGKR |
| | | RELVALITSSDTTDYAEDVKGRFTISRDNSWNTVYLQMNSLRPED |
| | | TAVYYCHSDHYSLGVPEKRVILYGQGTLVTVSSGGGGSGGGGSG |
| | | GGGSGGGGSGGGGSGGGGSGGGGSEVQLVESGGGLVQPGGSLRL |
| | | SCAASGFTFSSYPMSWVRQAPGKGPAWVSTVSPGGITTSYADSVK |
| | | GRFTISRDNSKNTLYLQMNSLRPEDTAVYYCLRDLGNRGQGTLVT |
| | | VSSGGGGSGGGGSGGGGSGGGGSGGGGSGGGGSGGGGSEVQLV |
| | | ESGGGLVQPGNSLRLSCAASGFTFSSFGMSWVRQAPGKGLEWVS |
| | | SISGSGSDTLYADSVKGRFTISRDNAKTTLYLQMNSLRPEDTAVY |
| | | YCTIGGSLSRSSQGTLVTVSS |
| HER3MS00199 | 310 | EVQLVESGGGLVQPGGSLRLSCAASGTLFKINAMGWYRQAPGKR |
| | | RELVALITSSDTTDYAEDVKGRFTISRDNSWNTVYLQMNSLRPED |
| | | TAVYYCHSDHYSLGVPEKRVILYGQGTLVTVSSGGGGSGGGSEV |
| | | QLVESGGGLVQPGNSLRLSCAASGFTFSSFGMSWVRQAPGKGLE |
| | | WVSSISGSGSDTLYADSVKGRFTISRDNAKTTLYLQMNSLRPEDT |
| | | AVYYCTIGGSLSRSSQGTLVTVSSGGGGSGGGSEVQLVESGGGLV |
| | | QPGGSLRLSCAASGRTYYLNAMGWFRQAPGKEREFVAAIDWSEG |
| | | NKDYADSVKGRFTISRDASKNTVYLQMNSLRPEDTAVYYCAADT |
| | | PPWGPLIYIESYDSWGQGTLVTVSS |
| HER3MS00200 | 311 | EVQLVESGGGLVQPGGSLRLSCAASGTLFKINAMGWYRQAPGKR |
| | | RELVALITSSDTTDYAEDVKGRFTISRDNSWNTVYLQMNSLRPED |
| | | TAVYYCHSDHYSLGVPEKRVILYGQGTLVTVSSGGGGSGGGSEV |
| | | QLVESGGGLVQPGGSLRLSCAASGRTYYLNAMGWFRQAPGKERE |
| | | FVAAIDWSEGNKDYADSVKGRFTISRDASKNTVYLQMNSLRPED |
| | | TAVYYCAADTPPWGPLIYIESYDSWGQGTLVTVSSGGGGSGGGSE |
| | | VQLVESGGGLVQPGNSLRLSCAASGFTFSSFGMSWVRQAPGKGL |
| | | EWVSSISGSGSDTLYADSVKGRFTISRDNAKTTLYLQMNSLRPEDT |
| | | AVYYCTIGGSLSRSSQGTLVTVSS |
| HER3MS00201 | 312 | EVQLVESGGGLVQPGGSLRLSCAASGRTYYLNAMGWFRQAPGKE |
| | | REFVAAIDWSEGNKDYADSVKGRFTISRDASKNTVYLQMNSLRPE |
| | | DTAVYYCAADTPPWGPLIYIESYDSWGQGTLVTVSSGGGGSGGG |
| | | SEVQLVESGGGLVQPGNSLRLSCAASGFTFSSFGMSWVRQAPGKG |
| | | LEWVSSISGSGSDTLYADSVKGRFTISRDNAKTTLYLQMNSLRPED |
| | | TAVYYCTIGGSLSRSSQGTLVTVSSGGGGSGGGSEVQLVESGGGL |
| | | VQPGGSLRLSCAASGTLFKINAMGWYRQAPGKRRELVALITSSDT |
| | | TDYAEDVKGRFTISRDNSWNTVYLQMNSLRPEDTAVYYCHSDHY |
| | | SLGVPEKRVILYGQGTLVTVSS |
| HER3MS00202 | 313 | EVQLVESGGGLVQPGGSLRLSCAASGRTYYLNAMGWFRQAPGKE |
| | | REFVAAIDWSEGNKDYADSVKGRFTISRDASKNTVYLQMNSLRPE |
| | | DTAVYYCAADTPPWGPLIYIESYDSWGQGTLVTVSSGGGGSGGG |
| | | SEVQLVESGGGLVQPGGSLRLSCAASGTLFKINAMGWYRQAPGK |
| | | RRELVALITSSDTTDYAEDVKGRFTISRDNSWNTVYLQMNSLRPE |
| | | DTAVYYCHSDHYSLGVPEKRVILYGQGTLVTVSSGGGGSGGGSE |
| | | VQLVESGGGLVQPGNSLRLSCAASGFTFSSFGMSWVRQAPGKGL |
| | | EWVSSISGSGSDTLYADSVKGRFTISRDNAKTTLYLQMNSLRPEDT |
| | | AVYYCTIGGSLSRSSQGTLVTVSS |
| HER3MS00207 | 314 | EVQLVESGGGLVQPGGSLRLSCAASGTLFKINAMGWYRQAPGKR |
| | | RELVALITSSDTTDYAEDVKGRFTISRDNSWNTVYLQMNSLRPED |
| | | TAVYYCHSDHYSLGVPEKRVILYGQGTLVTVSSGGGGSGGGSEV |
| | | QLVESGGGLVQPGNSLRLSCAASGFTFSSFGMSWVRQAPGKGLE |
| | | WVSSISGSGSDTLYADSVKGRFTISRDNAKTTLYLQMNSLRPEDT |
| | | AVYYCTIGGSLSRSSQGTLVTVSSGGGGSGGGSEVQLVESGGGLV |
| | | QPGGSLRLSCAASGSIGGLNAMAWYRQAPGKERELVAGIFGVGST |
| | | RYADSVKGRFTISRDNSKNTVYLQMNSLRPEDTAVYYCRMSSVT |
| | | RGSSDYWGQGTLVTVSS |
| HER3MS00208 | 315 | EVQLVESGGGLVQPGGSLRLSCAASGFTFSSYPMSWVRQAPGKGP |
| | | EWVSTVSPGGITTSYADSVKGRFTISRDNSKNTLYLQMNSLRPEDT |
| | | AVYYCLRDLGNRGQGTLVTVSSGGGGSGGGSEVQLVESGGGLVQ |
| | | PGNSLRLSCAASGFTFSSFGMSWVRQAPGKGLEWVSSISGSGSDT |
| | | LYADSVKGRFTISRDNAKTTLYLQMNSLRPEDTAVYYCTIGGSLS |
| | | RSSQGTLVTVSSGGGGSGGGSEVQLVESGGGLVQPGGSLRLSCAA |
| | | SGTLFKINAMGWYRQAPGKRRELVALITSSDTTDYAEDVKGRFTI |
| | | SRDNSWNTVYLQMNSLRPEDTAVYYCHSDHYSLGVPEKRVILYG |
| | | QGTLVTVSS |
| HER3MS00209 | 316 | DVQLVESGGGLVQPGGSLRLSCAASGSIGGLNAMAWYRQAPGKE |
| | | RELVAGIFGVGSTRYADSVKGRFTISRDNSKNTVYLQMNSLRPED |
| | | TAVYYCRMSSVTRGSSDYWGQGTLVTVSSGGGGSGGGSEVQLVE |
| | | SGGGLVQPGNSLRLSCAASGFTFSSFGMSWVRQAPGKGLEWVSSI |
| | | SGSGSDTLYADSVKGRFTISRDNAKTTLYLQMNSLRPEDTAVYYC |
| | | TIGGSLSRSSQGTLVTVSS |
| HER3MS00210 | 317 | EVQLVESGGGLVQPGGSLRLSCAASGRTYYLNAMGWFRQAPGKE |
| | | REFVAAIDWSEGNKDYADSVKGRFTISRDNSKNTVYLQMNSLRPE |
| | | DTAVYYCAADTPPWGPLIYIESYDSWGQGTLVTVSSGGGGSGGG |
| | | SEVQLVESGGGLVQPGNSLRLSCAASGFTFSSFGMSWVRQAPGKG |
| | | LEWVSSISGSGSDTLYADSVKGRFTISRDNAKTTLYLQMNSLRPED |
| | | TAVYYCTIGGSLSRSSQGTLVTVSSGGGGSGGGSEVQLVESGGGL |
| | | VQPGGSLRLSCAASGTLFKINAMGWYRQAPGKRRELVALITSSDT |
| | | TDYAEDVKGRFTISRDNSWNTVYLQMNSLRPEDTAVYYCHSDHY |
| | | SLGVPEKRVILYGQGTLVTVSS |
| HER3MS00211 | 318 | EVQLVESGGGLVQPGGSLRLSCAASGTLFKINAMGWYRQAPGKR |
| | | RELVALITSSDTTDYADSVKGRFTISRDNSWNTVYLQMNSLRPED |
| | | TAVYYCHSDHYSLGVPEKRVILYGQGTLVTVSSAAAEQKLISEED |
| | | LNGAAHHHHHH |
| HER3MS00212 | 319 | DVQLVESGGGLVQPGGSLRLSCAASGSIGGLNAMAWYRQAPGKE |
| | | RELVAGIFGVGSTRYADSVKGRFTISRDNSKNTVYLQMNSLRPED |
| | | TAVYYCRMSSVTRGSSDYWGQGTLVTVSSGGGGSGGGSEVQLVE |
| | | SGGGLVQPGNSLRLSCAASGFTFSSFGMSWVRQAPGKGLEWVSSI |
| | | SGSGSDTLYADSVKGRFTISRDNAKTTLYLQMNSLRPEDTAVYYC |
| | | TIGGSLSRSSQGTLVTVSSGGGGSGGGSEVQLVESGGGLVQPGGS |
| | | LRLSCAASGTLFKINAMGWYRQAPGKRRELVALITSSDTTDYADS |
| | | VKGRFTISRDNSWNTVYLQMNSLRPEDTAVYYCHSDHYSLGVPE |
| | | KRVILYGQGTLVTVSS |
| HER3MS00213 | 320 | EVQLVESGGGLVQPGGSLRLSCAASGFTFSSYPMSWVRQAPGKGP |
| | | EWVSTVSPGGITTSYADSVKGRFTISRDNSKNTLYLQMNSLRPEDT |
| | | AVYYCLRDLGNRGQGTLVTVSSGGGGSGGGSEVQLVESGGGLVQ |
| | | PGNSLRLSCAASGFTFSSFGMSWVRQAPGKGLEWVSSISGSGSDT |
| | | LYADSVKGRFTISRDNAKTTLYLQMNSLRPEDTAVYYCTIGGSLS |
| | | RSSQGTLVTVSSGGGGSGGGSEVQLVESGGGLVQPGGSLRLSCAA |
| | | SGTLFKINAMGWYRQAPGKRRELVALITSSDTTDYADSVKGRFTI |
| | | SRDNSWNTVYLQMNSLRPEDTAVYYCHSDHYSLGVPEKRVILYG |
| | | QGTLVTVSS |
| HER3MS00214 | 321 | EVQLVESGGGLVQPGGSLRLSCAASGRTYYLNAMGWFRQAPGKE |
| | | REFVAAIDWSEGNKDYADSVKGRFTISRDNSKNTVYLQMNSLRPE |
| | | DTAVYYCAADTPPWGPLIYIESYDSWGQGTLVTVSSGGGGSGGG |
| | | SEVQLVESGGGLVQPGNSLRLSCAASGFTFSSFGMSWVRQAPGKG |
| | | LEWVSSISGSGSDTLYADSVKGRFTISRDNAKTTLYLQMNSLRPED |
| | | TAVYYCTIGGSLSRSSQGTLVTVSSGGGGSGGGSEVQLVESGGGL |
| | | VQPGGSLRLSCAASGTLFKINAMGWYRQAPGKRRELVALITSSDT |
| | | TDYADSVKGRFTISRDNSWNTVYLQMNSLRPEDTAVYYCHSDHY |
| | | SLGVPEKRVILYGQGTLVTVSS |
| HER3MS00215 | 322 | EVQLVESGGGLVQPGGSLRLSCAASGTLFKINAMGWYRQAPGKR |
| | | RELVALITSSDTTDYADSVKGRFTISRDNSWNTVYLQMNSLRPED |
| | | TAVYYCHSDHYSLGVPEKRVILYGQGTLVTVSSGGGGSGGGSEV |
| | | QLVESGGGLVQPGNSLRLSCAASGFTFSSFGMSWVRQAPGKGLE |
| | | WVSSISGSGSDTLYADSVKGRFTISRDNAKTTLYLQMNSLRPEDT |
| | | AVYYCTIGGSLSRSSQGTLVTVSSGGGGSGGGSEVQLVESGGGLV |
| | | QPGGSLRLSCAASGSIGGLNAMAWYRQAPGKERELVAGIFGVGST |
| | | RYADSVKGRFTISRDNSKNTVYLQMNSLRPEDTAVYYCRMSSVT |
| | | RGSSDYWGQGTLVTVSS |
| HER3MS004C07 | 323 | EVQLVESGGGLVQAGGSLRLSCAASGFTFSSYPMSWVRQAPGKG |
| | | PAWVSTVSPGGITTSYADSVKGRFTISRDNAKNTLYLQMNSLKPE |
| | | DTAVYYCLRDLNNRGQGTQVTVSSAAAEQKLISEEDLNGAAHHH |
| | | HHH |
| HER3MS017B05 | 324 | EVQLVESGGGLVQPGGSLRLSCAASGSIGGLNAMAWYRQAPGKE |
| | | RELVAGIFGVGSTRYADSVKGRFTISRDIAKNTVFLQMNSLNSEDT |
| | | AVYYCRMSSVTRGSSDYWGQGTQVTVSSAAAEQKLISEEDLNGA |
| | | AHHHHHH |
| HER3MS018G11 | 325 | EVQLVESGGGLVQPGGSLRLSCAASGTLFKINAMGWYRQAPGKR |
| | | RELVALITSSDTTDYAESVEGRFTISRDNTWNAVYLQMNSLKPED |
| | | TAVYYCHSDHYSMGVPEKRVIMYGQGTQVTVSSAAAEQKLISEE |
| | | DLNGAAHHHHHH |
| HER3MS021F06 | 326 | EVQLVESGGGLVQAGGSLRLSCAASGRTYYLNAMGWFRQGPGK |
| | | DREFVAAIDWSDGNKDYADSVKGRFTISRDNAKNTVYLQMNSLK |
| | | PEDTAVYYCAADTPPWGPMIYIESYDSWGQGTQVTVSSAAAEQK |
| | | LISEEDLNGAAHHHHHH |
| HER3MS034C07 | 327 | EVQLVESGGGLVQPGGSLGLSCVASGSIFRINAMAWYRQAPGKQ |
| | | RELVAEITAGGSTNYADSVKGRFTISVDNAWNTLYLQMNSLKVE |
| | | DTAVYYCNLDHYTTWDRRSAYWGQGTQVTVSSAAAEQKLISEE |
| | | DLNGAAHHHHHH |

[0604] It will be clear to the skilled person that the Nanobodies that are mentioned herein as “preferred” (or “more preferred”, “even more preferred”, etc.) are also preferred (or more preferred, or even more preferred, etc.) for use in the polypeptides described herein. Thus, polypeptides that comprise or essentially consist of one or more “preferred” Nanobodies of the invention will generally be preferred, and polypeptides that comprise or essentially consist of one or more “more preferred” Nanobodies of the invention will generally be more preferred, etc.

[0605] Generally, proteins or polypeptides that comprise or essentially consist of a single Nanobody (such as a single Nanobody of the invention) will be referred to herein as “monovalent” proteins or polypeptides or as “monovalent constructs”. Proteins and polypeptides that comprise or essentially consist of two or more Nanobodies (such as at least two Nanobodies of the invention or at least one Nanobody of the invention and at least one other Nanobody) will be referred to herein as “multivalent” proteins or polypeptides or as “multivalent constructs”, and these may provide certain advantages compared to the corresponding monovalent Nanobodies of the invention. Some non-limiting examples of such multivalent constructs will become clear from the further description herein.

[0606] According to one specific, but non-limiting aspect, a polypeptide of the invention comprises or essentially consists of at least two Nanobodies of the invention, such as two or three Nanobodies of the invention. As further described herein, such multivalent constructs can provide certain advantages compared to a protein or polypeptide comprising or essentially consisting of a single Nanobody of the invention, such as a much improved avidity for HER3. Such multivalent constructs will be clear to the skilled person based on the disclosure herein; some preferred, but non-limiting examples of such multivalent Nanobody constructs are the constructs of SEQ ID NO's: 147 to 327, more preferably HER3MS00135 (SEQ ID NO:282), HER3MS00212 (SEQ ID NO:319) or HER3MS00215 (SEQ ID NO:322). According to another specific, but non-limiting aspect, a polypeptide of the invention comprises or essentially consists of at least one Nanobody of the invention and at least one other binding unit (i.e. directed against another epitope, antigen, target, protein or polypeptide), which is preferably also a Nanobody. Such proteins or polypeptides are also referred to herein as “multispecific” proteins or polypeptides or as ‘multispecific constructs”, and these may provide certain advantages compared to the corresponding monovalent Nanobodies of the invention (as will become clear from the further discussion herein of some preferred, but, non-limiting multispecific constructs). Such multispecific constructs will be clear to the skilled person based on the disclosure herein; some preferred, but non-limiting examples of such multispecific Nanobody constructs are the constructs of SEQ ID NO's: 147 to 327, more preferably HER3MS00135 (SEQ ID NO:282), HER3MS00212 (SEQ ID NO:319) or HER3MS00215 (SEQ ID NO:322).

[0607] According to yet another specific, but non-limiting aspect, a polypeptide of the invention comprises or essentially consists of at least one Nanobody of the invention, optionally one or more further Nanobodies, and at least one other amino acid sequence (such as a protein or polypeptide) that confers at least one desired property to the Nanobody of the invention and/or to the resulting fusion protein. Again, such fusion proteins may provide certain advantages compared to the corresponding monovalent Nanobodies of the invention. Some non-limiting examples of such amino acid sequences and of such fusion constructs will become clear from the further description herein.

[0608] It is also possible to combine two or more of the above aspects, for example to provide a trivalent bispecific construct comprising two Nanobodies of the invention and one other Nanobody, and optionally one or more other amino acid sequences. Further non-limiting examples of such constructs, as well as some constructs that are particularly preferred within the context of the present invention, will become clear from the further description herein.

[0609] In the above constructs, the one or more Nanobodies and/or other amino acid sequences may be directly linked to each other and/or suitably linked to each other via one or more linker sequences. Some suitable but non-limiting examples of such linkers will become clear from the further description herein.

[0610] In one specific aspect of the invention, a Nanobody of the invention or a compound, construct or polypeptide of the invention comprising at least one Nanobody of the invention may have an increased half-life, compared to the corresponding amino acid sequence of the invention. Some preferred, but non-limiting examples of such Nanobodies, compounds and polypeptides will become clear to the skilled person based on the further disclosure herein, and for example comprise Nanobodies sequences or polypeptides of the invention that have been chemically modified to increase the half-life thereof (for example, by means of pegylation); amino acid sequences of the invention that comprise at least one additional binding site for binding to a serum protein (such as serum albumin, see for example EP 0 368 684 B1, page 4); or polypeptides of the invention that comprise at least one Nanobody of the invention that is linked to at least one moiety (and in particular at least one amino acid sequence) that increases the half-life of the Nanobody of the invention. Examples of polypeptides of the invention that comprise such half-life extending moieties or amino acid sequences will become clear to the skilled person based on the further disclosure herein; and for example include, without limitation, polypeptides in which the one or more Nanobodies of the invention are suitable linked to one or more serum proteins or fragments thereof (such as serum albumin or suitable fragments thereof) or to one or more binding units that can bind to serum proteins (such as, for example, Nanobodies or (single) domain antibodies that can bind to serum proteins such as serum albumin, serum immunoglobulins such as IgG, or transferrine); polypeptides in which a Nanobody of the invention is linked to an Fc portion (such as a human Fc) or a suitable part or fragment thereof; or polypeptides in which the one or more Nanobodies of the invention are suitable linked to one or more small proteins or peptides that can bind to serum proteins.

[0611] Again, as will be clear to the skilled person, such Nanobodies, compounds, constructs or polypeptides may contain one or more additional groups, residues, moieties or binding units, such as one or more further amino acid sequences and in particular one or more additional Nanobodies (i.e. not directed against HER3), so as to provide a tri- of multispecific Nanobody construct.

[0612] Generally, the Nanobodies of the invention (or compounds, constructs or polypeptides comprising the same) with increased half-life preferably have a half-life that is at least 1.5 times, preferably at least 2 times, such as at least 5 times, for example at least 10 times or more than 20 times, greater than the half-life of the corresponding amino acid sequence of the invention per se. For example, the Nanobodies, compounds, constructs or polypeptides of the invention with increased half-life may have a half-life that is increased with more than 1 hours, preferably more than 2 hours, more preferably more than 6 hours, such as more than 12 hours, or even more than 24, 48 or 72 hours, compared to the corresponding amino acid sequence of the invention per se.

[0613] In a preferred, but non-limiting aspect of the invention, such Nanobodies, compound, constructs or polypeptides of the invention exhibit a serum half-life in human of at least about 12 hours, preferably at least 24 hours, more preferably at least 48 hours, even more preferably at least 72 hours or more. For example, compounds or polypeptides of the invention may have a half-life of at least 5 days (such as about 5 to 10 days), preferably at least 9 days (such as about 9 to 14 days), more preferably at least about 10 days (such as about 10 to 15 days), or at least about 11 days (such as about 11 to 16 days), more preferably at least about 12 days (such as about 12 to 18 days or more), or more than 14 days (such as about 14 to 19 days). Such half-life extended constructs will be clear to the skilled person based on the disclosure herein; some preferred, but non-limiting examples of such multispecific Nanobody constructs are the constructs of SEQ ID NO's: 147 to 327, more preferably HER3MS00135 (SEQ ID NO:282), HER3MS00212 (SEQ ID NO:319) or HER3MS00215 (SEQ ID NO:322).

[0614] In particular, polypeptides comprising one or more Nanobodies of the invention are preferably such that they:
[0615] bind to HER3 with a dissociation constant (K_{D}) of 10⁻⁵ to 10⁻¹² moles/liter or less, and preferably 10⁻⁷ to 10⁻¹² moles/liter or less and more preferably 10⁻⁸ to 10⁻¹² moles/liter (i.e. with an association constant (K_{A}) of 10⁵ to 10¹² liter/moles or more, and preferably 10⁷ to 10¹² liter/moles or more and more preferably 10⁸ to 10¹² liter/moles);
   and/or such that they:
[0616] bind to HER3 with a kₒₙ-rate of between 10² M⁻¹s⁻¹ to about 10⁷ M⁻¹s⁻¹, preferably between 10³ M⁻¹s⁻¹ and 10⁷ M⁻¹s⁻¹, more preferably between 10⁴ M⁻¹s⁻¹ and 10⁷ M⁻s⁻¹, such as between 10⁵ M⁻¹s⁻¹ and 10⁷ M⁻¹s⁻¹;
   and/or such that they:
[0617] bind to HER3 with a k_{off} rate between 1 s⁻¹ (t_{1/2}=0.69 s) and 10⁻⁶ s⁻¹ (providing a near irreversible complex with a t_{1/2} of multiple days), preferably between 10⁻² s⁻¹ and 10⁻⁶ s⁻¹, more preferably between 10⁻³ s⁻¹ and 10⁻⁶ s⁻¹, such as between 10⁻⁴ s⁻¹ and 10⁻⁶ s⁻¹.

[0618] Preferably, a polypeptide that contains only one amino acid sequence of the invention is preferably such that it will bind to HER3 with an affinity less than 500 nM, preferably less than 200 nM, more preferably less than 10 nM, such as less than 1 nM. In this respect, it will be clear to the skilled person that a polypeptide that contains two or more Nanobodies of the invention may bind to HER3 with an increased avidity, compared to a polypeptide that contains only one amino acid sequence of the invention.

[0619] Some preferred IC₅₀ values for binding of the amino acid sequences or polypeptides of the invention to HER3 will become clear from the further description and examples herein.

[0620] Other polypeptides according to this preferred aspect of the invention may for example be chosen from the group consisting of amino acid sequences that have more than 80%, preferably more than 90%, more preferably more than 95%, such as 99% or more “sequence identity” (as defined herein) with one or more of the amino acid sequences of SEQ ID NO's: 147 to 327, more preferably HER3MS00135 (SEQ ID NO:282), HER3MS00212 (SEQ ID NO:319) or HER3MS00215 (SEQ ID NO:322) (see Table A-2), in which the Nanobodies comprised within said amino acid sequences are preferably as further defined herein.

[0621] Another aspect of this invention relates to a nucleic acid that encodes an amino acid sequence of the invention (such as an ISV or Nanobody of the invention) or a polypeptide of the invention comprising the same. Again, as generally described herein for the nucleic acids of the invention, such a nucleic acid may be in the form of a genetic construct, as defined herein.

[0622] Other nucleic acids according to a preferred aspect of the invention may for example be chosen from the group consisting of nucleic acid sequences that have more than 80%, preferably more than 90%, more preferably more than 95%, such as 99% or more “sequence identity” (as defined herein) with one or more of the nucleic acid sequences of SEQ ID NO's: 27 to 41 (see FIG. 1).

[0623] In another aspect, the invention relates to host or host cell that expresses or that is capable of expressing an amino acid sequence (such as a Nanobody) of the invention and/or a polypeptide of the invention comprising the same; and/or that contains a nucleic acid of the invention. Some preferred but non-limiting examples of such hosts or host cells will become clear from the further description herein.

[0624] Another aspect of the invention relates to a product or composition containing or comprising at least one amino acid sequence of the invention, at least one polypeptide of the invention and/or at least one nucleic acid of the invention, and optionally one or more further components of such compositions known per se, i.e. depending on the intended use of the composition. Such a product or composition may for example be a pharmaceutical composition (as described herein), a veterinary composition or a product or composition for diagnostic use (as also described herein). Some preferred but non-limiting examples of such products or compositions will become clear from the further description herein.

[0625] The invention further relates to methods for preparing or generating the amino acid sequences, compounds, constructs, polypeptides, nucleic acids, host cells, products and compositions described herein. Some preferred but non-limiting examples of such methods will become clear from the further description herein.

[0626] The invention further relates to applications and uses of the amino acid sequences, compounds, constructs, polypeptides, nucleic acids, host cells, products and compositions described herein, as well as to methods for the prevention and/or treatment for diseases and disorders associated with HER3. Some preferred but non-limiting applications and uses will become clear from the further description herein.

[0627] Other aspects, embodiments, advantages and applications of the invention will also become clear from the further description herein below.

[0628] Generally, it should be noted that the term Nanobody as used herein in its broadest sense is not limited to a specific biological source or to a specific method of preparation. For example, as will be discussed in more detail below, the Nanobodies of the invention can generally be obtained by any of the techniques (1) to (8) mentioned on pages 61 and 62 of WO 08/020,079, or any other suitable technique known per se. One preferred class of Nanobodies corresponds to the V_{HH} domains of naturally occurring heavy chain antibodies directed against HER3. As further described herein, such V_{HH} sequences can generally be generated or obtained by suitably immunizing a species of Camelid with HER3 (i.e. so as to raise an immune response and/or heavy chain antibodies directed against HER3), by obtaining a suitable biological sample from said Camelid (such as a blood sample, serum sample or sample of B-cells), and by generating V_{HH} sequences directed against HER3, starting from said sample, using any suitable technique known per se. Such techniques will be clear to the skilled person and/or are further described herein.

[0629] Alternatively, such naturally occurring V_{HH} domains against HER3, can be obtained from naïve libraries of Camelid V_{HH} sequences, for example by screening such a library using HER3, or at least one part, fragment, antigenic determinant or epitope thereof using one or more screening techniques known per se. Such libraries and techniques are for example described in WO 99/37681, WO 01/90190, WO 03/025020 and WO 03/035694. Alternatively, improved synthetic or semi-synthetic libraries derived from naïve V_{HH} libraries may be used, such as V_{HH} libraries obtained from naïve V_{HH} libraries by techniques such as random mutagenesis and/or CDR shuffling, as for example described in WO 00/43507.

[0630] Thus, in another aspect, the invention relates to a method for generating Nanobodies, that are directed against HER3. In one aspect, said method at least comprises the steps of:
[0631] a) providing a set, collection or library of Nanobody sequences; and
[0632] b) screening said set, collection or library of Nanobody sequences for Nanobody sequences that can bind to and/or have affinity for HER3;
   and
[0633] c) isolating the Nanobody or Nanobodies that can bind to and/or have affinity for HER3.

[0634] In such a method, the set, collection or library of Nanobody sequences may be a naïve set, collection or library of Nanobody sequences; a synthetic or semi-synthetic set, collection or library of Nanobody sequences; and/or a set, collection or library of Nanobody sequences that have been subjected to affinity maturation.

[0635] In a preferred aspect of this method, the set, collection or library of Nanobody sequences may be an immune set, collection or library of Nanobody sequences, and in particular an immune set, collection or library of V_{HH} sequences, that have been derived from a species of Camelid that has been suitably immunized with HER3 or with a suitable antigenic determinant based thereon or derived therefrom, such as an antigenic part, fragment, region, domain, loop or other epitope thereof. In one particular aspect, said antigenic determinant may be an extracellular part, region, domain, loop or other extracellular epitope(s).

[0636] In the above methods, the set, collection or library of Nanobody or V_{HH} sequences may be displayed on a phage, phagemid, ribosome or suitable micro-organism (such as yeast), such as to facilitate screening. Suitable methods, techniques and host organisms for displaying and screening (a set, collection or library of) Nanobody sequences will be clear to the person skilled in the art, for example on the basis of the further disclosure herein. Reference is also made to the review by Hoogenboom in Nature Biotechnology, 23, 9, 1105-1116 (2005).

[0637] In another aspect, the method for generating Nanobody sequences comprises at least the steps of:
[0638] a) providing a collection or sample of cells derived from a species of Camelid that express immunoglobulin sequences;
[0639] b) screening said collection or sample of cells for (i) cells that express an immunoglobulin sequence that can bind to and/or have affinity for HER3; and (ii) cells that express heavy chain antibodies, in which substeps (i) and (ii) can be performed essentially as a single screening step or in any suitable order as two separate screening steps, so as to provide at least one cell that expresses a heavy chain antibody that can bind to and/or has affinity for HER3;
   and
[0640] c) either (i) isolating from said cell the V_{HH} sequence present in said heavy chain antibody; or (ii) isolating from said cell a nucleic acid sequence that encodes the V_{HH} sequence present in said heavy chain antibody, followed by expressing said V_{HH} domain.

[0641] In the method according to this aspect, the collection or sample of cells may for example be a collection or sample of B-cells. Also, in this method, the sample of cells may be derived from a Camelid that has been suitably immunized with HER3 or a suitable antigenic determinant based thereon or derived therefrom, such as an antigenic part, fragment, region, domain, loop or other epitope thereof. In one particular aspect, said antigenic determinant may be an extracellular part, region, domain, loop or other extracellular epitope(s).

[0642] The above method may be performed in any suitable manner, as will be clear to the skilled person. Reference is for example made to EP 0 542 810, WO 05/19824, WO 04/051268 and WO 04/106377. The screening of step b) is preferably performed using a flow cytometry technique such as FACS. For this, reference is for example made to Lieby et al., Blood, Vol. 97, No. 12, 3820. Particular reference is made to the so-called “Nanoclone®” technique described in International application WO 06/079372 by Ablynx N.V.

[0643] In another aspect, the method for generating an amino acid sequence directed against HER3 may comprise at least the steps of:
[0644] a) providing a set, collection or library of nucleic acid sequences encoding heavy chain antibodies or Nanobody sequences;
[0645] b) screening said set, collection or library of nucleic acid sequences for nucleic acid sequences that encode a heavy chain antibody or a Nanobody sequence that can bind to and/or has affinity for HER3;
   and
[0646] c) isolating said nucleic acid sequence, followed by expressing the V_{HH} sequence present in said heavy chain antibody or by expressing said Nanobody sequence, respectively.

[0647] In such a method, the set, collection or library of nucleic acid sequences encoding heavy chain antibodies or Nanobody sequences may for example be a set, collection or library of nucleic acid sequences encoding a naïve set, collection or library of heavy chain antibodies or V_{HH} sequences; a set, collection or library of nucleic acid sequences encoding a synthetic or semi-synthetic set, collection or library of Nanobody sequences; and/or a set, collection or library of nucleic acid sequences encoding a set, collection or library of Nanobody sequences that have been subjected to affinity maturation.

[0648] In a preferred aspect of this method, the set, collection or library of nucleic acid sequences may be an immune set, collection or library of nucleic acid sequences encoding heavy chain antibodies or V_{HH} sequences derived from a Camelid that has been suitably immunized with HER3 or with a suitable antigenic determinant based thereon or derived therefrom, such as an antigenic part, fragment, region, domain, loop or other epitope thereof. In one particular aspect, said antigenic determinant may be an extracellular part, region, domain, loop or other extracellular epitope(s).

[0649] In the above methods, the set, collection or library of nucleotide sequences may be displayed on a phage, phagemid, ribosome or suitable micro-organism (such as yeast), such as to facilitate screening. Suitable methods, techniques and host organisms for displaying and screening (a set, collection or library of) nucleotide sequences encoding amino acid sequences will be clear to the person skilled in the art, for example on the basis of the further disclosure herein. Reference is also made to WO03054016 and to the review by Hoogenboom in Nature Biotechnology, 23, 9, 1105-1116 (2005).

[0650] As will be clear to the skilled person, the screening step of the methods described herein can also be performed as a selection step. Accordingly the term “screening” as used in the present description can comprise selection, screening or any suitable combination of selection and/or screening techniques. Also, when a set, collection or library of sequences is used, it may contain any suitable number of sequences, such as 1, 2, 3 or about 5, 10, 50, 100, 500, 1000, 5000, 10⁴, 10⁵, 10⁶, 10⁷, 10⁸ or more sequences.

[0651] Also, one or more or all of the sequences in the above set, collection or library of amino acid sequences may be obtained or defined by rational, or semi-empirical approaches such as computer modelling techniques or biostatics or datamining techniques.

[0652] Furthermore, such a set, collection or library can comprise one, two or more sequences that are variants from one another (e.g. with designed point mutations or with randomized positions), compromise multiple sequences derived from a diverse set of naturally diversified sequences (e.g. an immune library), or any other source of diverse sequences (as described for example in Hoogenboom et al, Nat Biotechnol 23:1105, 2005 and Binz et al, Nat Biotechnol 2005, 23:1247). Such set, collection or library of sequences can be displayed on the surface of a phage particle, a ribosome, a bacterium, a yeast cell, a mammalian cell, and linked to the nucleotide sequence encoding the amino acid sequence within these carriers. This makes such set, collection or library amenable to selection procedures to isolate the desired amino acid sequences of the invention. More generally, when a sequence is displayed on a suitable host or host cell, it is also possible (and customary) to first isolate from said host or host cell a nucleotide sequence that encodes the desired sequence, and then to obtain the desired sequence by suitably expressing said nucleotide sequence in a suitable host organism. Again, this can be performed in any suitable manner known per se, as will be clear to the skilled person.

[0653] The invention also relates to the V_{HH} sequences or Nanobody sequences that are obtained by the above methods, or alternatively by a method that comprises the one of the above methods and in addition at least the steps of determining the nucleotide sequence or amino acid sequence of said V_{HH} sequence or Nanobody sequence; and of expressing or synthesizing said V_{HH} sequence or Nanobody sequence in a manner known per se, such as by expression in a suitable host cell or host organism or by chemical synthesis.

[0654] As mentioned herein, a particularly preferred class of Nanobodies of the invention comprises Nanobodies with an amino acid sequence that corresponds to the amino acid sequence of a naturally occurring V_{HH} domain, but that has been e.g. “humanized” or otherwise sequence optimized in view of better production yields or better stability, i.e. by replacing one or more amino acid residues in the amino acid sequence of said naturally occurring V_{HH} sequence (and in particular in the framework sequences) by one or more of the amino acid residues that occur at the corresponding position(s) in a V_{H} domain from a conventional 4-chain antibody from a human being (e.g. indicated above), as further described on, and using the techniques mentioned on, page 63 of WO 08/020,079. Another particularly preferred class of Nanobodies of the invention comprises Nanobodies with an amino acid sequence that corresponds to the amino acid sequence of a naturally occurring V_{H} domain, but that has been “camelized”, i.e. by replacing one or more amino acid residues in the amino acid sequence of a naturally occurring V_{H} domain from a conventional 4-chain antibody by one or more of the amino acid residues that occur at the corresponding position(s) in a V_{HH} domain of a heavy chain antibody, as further described on, and using the techniques mentioned on, page 63 of WO 08/020,079.

[0655] Other suitable methods and techniques for obtaining the Nanobodies of the invention and/or nucleic acids encoding the same, starting from naturally occurring V_{H} sequences or preferably V_{HH} sequences, will be clear from the skilled person, and may for example include the techniques that are mentioned on page 64 of WO 08/00279As mentioned herein, Nanobodies may in particular be characterized by the presence of one or more “Hallmark residues” (as described herein) in one or more of the framework sequences.

[0656] The invention in its broadest sense also comprises derivatives of the Nanobodies of the invention. Such derivatives can generally be obtained by modification, and in particular by chemical and/or biological (e.g enzymatical) modification, of the Nanobodies of the invention and/or of one or more of the amino acid residues that form the Nanobodies of the invention.

[0657] Examples of such modifications, as well as examples of amino acid residues within the Nanobody sequence that can be modified in such a manner (i.e. either on the protein backbone but preferably on a side chain), methods and techniques that can be used to introduce such modifications and the potential uses and advantages of such modifications will be clear to the skilled person.

[0658] For example, such a modification may involve the introduction (e.g. by covalent linking or in an other suitable manner) of one or more functional groups, residues or moieties into or onto the Nanobody of the invention, and in particular of one or more functional groups, residues or moieties that confer one or more desired properties or functionalities to the Nanobody of the invention. Example of such functional groups will be clear to the skilled person.

[0659] For example, such modification may comprise the introduction (e.g. by covalent binding or in any other suitable manner) of one or more functional groups that increase the half-life, the solubility and/or the absorption of the Nanobody of the invention, that reduce the immunogenicity and/or the toxicity of the Nanobody of the invention, that eliminate or attenuate any undesirable side effects of the Nanobody of the invention, and/or that confer other advantageous properties to and/or reduce the undesired properties of the Nanobodies and/or polypeptides of the invention; or any combination of two or more of the foregoing. Examples of such functional groups and of techniques for introducing them will be clear to the skilled person, and can generally comprise all functional groups and techniques mentioned in the general background art cited hereinabove as well as the functional groups and techniques known per se for the modification of pharmaceutical proteins, and in particular for the modification of antibodies or antibody fragments (including ScFv's and single domain antibodies), for which reference is for example made to Remington's Pharmaceutical Sciences, 16th ed., Mack Publishing Co., Easton, Pa. (1980). Such functional groups may for example be linked directly (for example covalently) to a Nanobody of the invention, or optionally via a suitable linker or spacer, as will again be clear to the skilled person.

[0660] One of the most widely used techniques for increasing the half-life and/or reducing the immunogenicity of pharmaceutical proteins comprises attachment of a suitable pharmacologically acceptable polymer, such as poly(ethyleneglycol) (PEG) or derivatives thereof (such as methoxypoly(ethyleneglycol) or mPEG). Generally, any suitable form of pegylation can be used, such as the pegylation used in the art for antibodies and antibody fragments (including but not limited to (single) domain antibodies and ScFv's); reference is made to for example Chapman, Nat. Biotechnol., 54, 531-545 (2002); by Veronese and Harris, Adv. Drug Deliv. Rev. 54, 453-456 (2003), by Harris and Chess, Nat. Rev. Drug. Discov., 2, (2003) and in WO 04/060965. Various reagents for pegylation of proteins are also commercially available, for example from Nektar Therapeutics, USA.

[0661] Preferably, site-directed pegylation is used, in particular via a cysteine-residue (see for example Yang et al., Protein Engineering, 16, 10, 761-770 (2003). For example, for this purpose, PEG may be attached to a cysteine residue that naturally occurs in a Nanobody of the invention, a Nanobody of the invention may be modified so as to suitably introduce one or more cysteine residues for attachment of PEG, or an amino acid sequence comprising one or more cysteine residues for attachment of PEG may be fused to the N- and/or C-terminus of a Nanobody of the invention, all using techniques of protein engineering known per se to the skilled person.

[0662] Preferably, for the Nanobodies and proteins of the invention, a PEG is used with a molecular weight of more than 5000, such as more than 10,000 and less than 200,000, such as less than 100,000; for example in the range of 20,000-80,000.

[0663] Another, usually less preferred modification comprises N-linked or O-linked glycosylation, usually as part of co-translational and/or post-translational modification, depending on the host cell used for expressing the Nanobody or polypeptide of the invention.

[0664] Yet another modification may comprise the introduction of one or more detectable labels or other signal-generating groups or moieties, depending on the intended use of the labelled Nanobody. Suitable labels and techniques for attaching, using and detecting them will be clear to the skilled person, and for example include, but are not limited to, the fluorescent labels, phosphorescent labels, chemiluminescent labels, bioluminescent labels, radio-isotopes, metals, metal chelates, metallic cations, chromophores and enzymes, such as those mentioned on page 109 of WO 08/020,079. Other suitable labels will be clear to the skilled person, and for example include moieties that can be detected using NMR or ESR spectroscopy.

[0665] Such labelled Nanobodies and polypeptides of the invention may for example be used for in vitro, in vivo or in situ assays (including immunoassays known per se such as ELISA, RIA, EIA and other “sandwich assays”, etc.) as well as in vivo diagnostic and imaging purposes, depending on the choice of the specific label.

[0666] As will be clear to the skilled person, another modification may involve the introduction of a chelating group, for example to chelate one of the metals or metallic cations referred to above. Suitable chelating groups for example include, without limitation, diethyl-enetriaminepentaacetic acid (DTPA) or ethylenediaminetetraacetic acid (EDTA).

[0667] Yet another modification may comprise the introduction of a functional group that is one part of a specific binding pair, such as the biotin-(strept)avidin binding pair. Such a functional group may be used to link the Nanobody of the invention to another protein, polypeptide or chemical compound that is bound to the other half of the binding pair, i.e. through formation of the binding pair. For example, a Nanobody of the invention may be conjugated to biotin, and linked to another protein, polypeptide, compound or carrier conjugated to avidin or streptavidin. For example, such a conjugated Nanobody may be used as a reporter, for example in a diagnostic system where a detectable signal-producing agent is conjugated to avidin or streptavidin. Such binding pairs may for example also be used to bind the Nanobody of the invention to a carrier, including carriers suitable for pharmaceutical purposes. One non-limiting example are the liposomal formulations described by Cao and Suresh, Journal of Drug Targetting, 8, 4, 257 (2000). Such binding pairs may also be used to link a therapeutically active agent to the Nanobody of the invention.

[0668] For some applications, in particular for those applications in which it is intended to kill a cell that expresses the target against which the Nanobodies of the invention are directed (e.g. in the treatment of cancer), or to reduce or slow the growth and/or proliferation such a cell, the Nanobodies of the invention may also be linked to a toxin or to a toxic residue or moiety. Examples of toxic moieties, compounds or residues which can be linked to a Nanobody of the invention to provide—for example—a cytotoxic compound will be clear to the skilled person and can for example be found in the prior art cited above and/or in the further description herein. One example is the so-called ADEPT™ technology described in WO 03/055527.

[0669] Other potential chemical and enzymatical modifications will be clear to the skilled person. Such modifications may also be introduced for research purposes (e.g. to study function-activity relationships). Reference is for example made to Lundblad and Bradshaw, Biotechnol. Appl. Biochem., 26, 143-151 (1997).

[0670] Preferably, the derivatives are such that they bind to HER3 with an affinity (suitably measured and/or expressed as a K_{D}-value (actual or apparent), a K_{A}-value (actual or apparent), a kₒₙ-rate and/or a k_{off}-rate, or alternatively as an IC₅₀ value, as further described herein) that is as defined herein for the Nanobodies of the invention.

[0671] As mentioned above, the invention also relates to proteins or polypeptides that essentially consist of or comprise at least one Nanobody of the invention. By “essentially consist of” is meant that the amino acid sequence of the polypeptide of the invention either is exactly the same as the amino acid sequence of a Nanobody of the invention or corresponds to the amino acid sequence of a Nanobody of the invention which has a limited number of amino acid residues, such as 1-20 amino acid residues, for example 1-10 amino acid residues and preferably 1-6 amino acid residues, such as 1, 2, 3, 4, 5 or 6 amino acid residues, added at the amino terminal end, at the carboxy terminal end, or at both the amino terminal end and the carboxy terminal end of the amino acid sequence of the Nanobody.

[0672] Said amino acid residues may or may not change, alter or otherwise influence the (biological) properties of the Nanobody and may or may not add further functionality to the Nanobody. For example, such amino acid residues:
[0673] can comprise an N-terminal Met residue, for example as result of expression in a heterologous host cell or host organism.
[0674] may form a signal sequence or leader sequence that directs secretion of the Nanobody from a host cell upon synthesis. Suitable secretory leader peptides will be clear to the skilled person, and may be as further described herein. Usually, such a leader sequence will be linked to the N-terminus of the Nanobody, although the invention in its broadest sense is not limited thereto;
[0675] may form a sequence or signal that allows the Nanobody to be directed towards and/or to penetrate or enter into specific organs, tissues, cells, or parts or compartments of cells, and/or that allows the Nanobody to penetrate or cross a biological barrier such as a cell membrane, a cell layer such as a layer of epithelial cells, a tumor including solid tumors, or the blood-brain-barrier. Examples of such amino acid sequences will be clear to the skilled person and include those mentioned in paragraph c) on page 112 of WO 08/020,079.
[0676] may form a “tag”, for example an amino acid sequence or residue that allows or facilitates the purification of the Nanobody, for example using affinity techniques directed against said sequence or residue. Thereafter, said sequence or residue may be removed (e.g. by chemical or enzymatical cleavage) to provide the Nanobody sequence (for this purpose, the tag may optionally be linked to the Nanobody sequence via a cleavable linker sequence or contain a cleavable motif). Some preferred, but non-limiting examples of such residues are multiple histidine residues, glutatione residues and a myc-tag (see for example SEQ ID NO:31 of WO 06/12282).
[0677] may be one or more amino acid residues that have been functionalized and/or that can serve as a site for attachment of functional groups. Suitable amino acid residues and functional groups will be clear to the skilled person and include, but are not limited to, the amino acid residues and functional groups mentioned herein for the derivatives of the Nanobodies of the invention.

[0678] According to another aspect, a polypeptide of the invention comprises a Nanobody of the invention, which is fused at its amino terminal end, at its carboxy terminal end, or both at its amino terminal end and at its carboxy terminal end to at least one further amino acid sequence, i.e. so as to provide a fusion protein comprising said Nanobody of the invention and the one or more further amino acid sequences. Such a fusion will also be referred to herein as a “Nanobody fusion”.

[0679] The one or more further amino acid sequence may be any suitable and/or desired amino acid sequences. The further amino acid sequences may or may not change, alter or otherwise influence the (biological) properties of the Nanobody, and may or may not add further functionality to the Nanobody or the polypeptide of the invention. Preferably, the further amino acid sequence is such that it confers one or more desired properties or functionalities to the Nanobody or the polypeptide of the invention.

[0680] For example, the further amino acid sequence may also provide a second binding site, which binding site may be directed against any desired protein, polypeptide, antigen, antigenic determinant or epitope (including but not limited to the same protein, polypeptide, antigen, antigenic determinant or epitope against which the Nanobody of the invention is directed, or a different protein, polypeptide, antigen, antigenic determinant or epitope).

[0681] Example of such amino acid sequences will be clear to the skilled person, and may generally comprise all amino acid sequences that are used in peptide fusions based on conventional antibodies and fragments thereof (including but not limited to ScFv's and single domain antibodies). Reference is for example made to the review by Holliger and Hudson, Nature Biotechnology, 23, 9, 1126-1136 (2005).

[0682] For example, such an amino acid sequence may be an amino acid sequence that increases the half-life, the solubility, or the absorption, reduces the immunogenicity or the toxicity, eliminates or attenuates undesirable side effects, and/or confers other advantageous properties to and/or reduces the undesired properties of the polypeptides of the invention, compared to the Nanobody of the invention per se. Some non-limiting examples of such amino acid sequences are serum proteins, such as human serum albumin (see for example WO 00/27435) or haptenic molecules (for example haptens that are recognized by circulating antibodies, see for example WO 98/22141).

[0683] In particular, it has been described in the art that linking fragments of immunoglobulins (such as V_{H} domains) to serum albumin or to fragments thereof can be used to increase the half-life. Reference is for made to WO 00/27435 and WO 01/077137. According to the invention, the Nanobody of the invention is preferably either directly linked to serum albumin (or to a suitable fragment thereof) or via a suitable linker, and in particular via a suitable peptide linked so that the polypeptide of the invention can be expressed as a genetic fusion (protein). According to one specific aspect, the Nanobody of the invention may be linked to a fragment of serum albumin that at least comprises the domain III of serum albumin or part thereof. Reference is for example made to WO 07/112,940 of Ablynx N.V.

[0684] Alternatively, the further amino acid sequence may provide a second binding site or binding unit that is directed against a serum protein (such as, for example, human serum albumin or another serum protein such as IgG), so as to provide increased half-life in serum. Such amino acid sequences for example include the Nanobodies described below, as well as the small peptides and binding proteins described in WO 91/01743, WO 01/45746 and WO 02/076489 and the dAb's described in WO 03/002609 and WO 04/003019. Reference is also made to Harmsen et al., Vaccine, 23 (41); 4926-42, 2005, as well as to EP 0 368 684, as well as to WO 08/028,977, WO 08/043,821, WO 08/043,822, WO 2008/068280 and WO 2009/127691).

[0685] Such amino acid sequences may in particular be directed against serum albumin (and more in particular human serum albumin) and/or against IgG (and more in particular human IgG). For example, such amino acid sequences may be amino acid sequences that are directed against (human) serum albumin and amino acid sequences that can bind to amino acid residues on (human) serum albumin that are not involved in binding of serum albumin to FcRn (see for example WO 06/0122787) and/or amino acid sequences that are capable of binding to amino acid residues on serum albumin that do not form part of domain III of serum albumin (see again for example WO 06/0122787); amino acid sequences that have or can provide an increased half-life (see for example WO 08/028,977 by Ablynx N.V.); amino acid sequences against human serum albumin that are cross-reactive with serum albumin from at least one species of mammal, and in particular with at least one species of primate (such as, without limitation, monkeys from the genus Macaca (such as, and in particular, cynomolgus monkeys (Macaca fascicularis) and/or rhesus monkeys (Macaca mulatta)) and baboon (Papio ursinus), reference is again made to WO 08/028,977; amino acid sequences that can bind to serum albumin in a pH independent manner (see for example WO 08/043,821 by Ablynx N.V. entitled “Amino acid sequences that bind to serum proteins in a manner that is essentially independent of the pH, compounds comprising the same, and uses thereof”) and/or amino acid sequences that are conditional binders (see for example WO 08/043,822 by Ablynx N.V. entitled “Amino acid sequences that bind to a desired molecule in a conditional manner”).

[0686] According to another aspect, the one or more further amino acid sequences may comprise one or more parts, fragments or domains of conventional 4-chain antibodies (and in particular human antibodies) and/or of heavy chain antibodies. For example, although usually less preferred, a Nanobody of the invention may be linked to a conventional (preferably human) V_{H} or V_{L} domain or to a natural or synthetic analog of a V_{H} or V_{L} domain, again optionally via a linker sequence (including but not limited to other (single) domain antibodies, such as the dAb's described by Ward et al. supra).

[0687] The at least one Nanobody may also be linked to one or more (preferably human) C_{H}1, C_{H}2 and/or C_{H}3 domains, optionally via a linker sequence. For instance, a Nanobody linked to a suitable C_{H}1 domain could for example be used—together with suitable light chains—to generate antibody fragments/structures analogous to conventional Fab fragments or F(ab′)₂ fragments, but in which one or (in case of an F(ab′)₂ fragment) one or both of the conventional V_{H} domains have been replaced by a Nanobody of the invention. Also, two Nanobodies could be linked to a C_{H}3 domain (optionally via a linker) to provide a construct with increased half-life in vivo.

[0688] According to one specific aspect of a polypeptide of the invention, one or more Nanobodies of the invention may be linked (optionally via a suitable linker or hinge region) to one or more constant domains (for example, 2 or 3 constant domains that can be used as part of/to form an Fc portion), to an Fc portion and/or to one or more antibody parts, fragments or domains that confer one or more effector functions to the polypeptide of the invention and/or may confer the ability to bind to one or more Fc receptors. For example, for this purpose, and without being limited thereto, the one or more further amino acid sequences may comprise one or more C_{H}2 and/or C_{H}3 domains of an antibody, such as from a heavy chain antibody (as described herein) and more preferably from a conventional human 4-chain antibody; and/or may form (part of) and Fc region, for example from IgG (e.g. from IgG1, IgG2, IgG3 or IgG4), from IgE or from another human Ig such as IgA, IgD or IgM. For example, WO 94/04678 describes heavy chain antibodies comprising a Camelid V_{HH} domain or a humanized derivative thereof (i.e. a Nanobody), in which the Camelidae C_{H}2 and/or C_{H}3 domain have been replaced by human C_{H}2 and C_{H}3 domains, so as to provide an immunoglobulin that consists of 2 heavy chains each comprising a Nanobody and human C_{H}2 and C_{H}3 domains (but no C_{H}1 domain), which immunoglobulin has the effector function provided by the C_{H}2 and C_{H}3 domains and which immunoglobulin can function without the presence of any light chains. Other amino acid sequences that can be suitably linked to the Nanobodies of the invention so as to provide an effector function will be clear to the skilled person, and may be chosen on the basis of the desired effector function(s). Reference is for example made to WO 04/058820, WO 99/42077, WO 02/056910 and WO 05/017148, as well as the review by Holliger and Hudson, supra; and to the non-prepublished US provisional application by Ablynx N.V. entitled “Constructs comprising single variable domains and an Fc portion derived from IgE” which has a filing date of Dec. 4, 2007. Coupling of a Nanobody of the invention to an Fc portion may also lead to an increased half-life, compared to the corresponding Nanobody of the invention. For some applications, the use of an Fc portion and/or of constant domains (i.e. C_{H}2 and/or C_{H}3 domains) that confer increased half-life without any biologically significant effector function may also be suitable or even preferred. Other suitable constructs comprising one or more Nanobodies and one or more constant domains with increased half-life in vivo will be clear to the skilled person, and may for example comprise two Nanobodies linked to a C_{H}3 domain, optionally via a linker sequence. Generally, any fusion protein or derivatives with increased half-life will preferably have a molecular weight of more than 50 kD, the cut-off value for renal absorption.

[0689] In another one specific, but non-limiting, aspect, in order to form a polypeptide of the invention, one or more amino acid sequences of the invention may be linked (optionally via a suitable linker or hinge region) to naturally occurring, synthetic or semisynthetic constant domains (or analogs, variants, mutants, parts or fragments thereof) that have a reduced (or essentially no) tendency to self-associate into dimers (i.e. compared to constant domains that naturally occur in conventional 4-chain antibodies). Such monomeric (i.e. not self-associating) Fc chain variants, or fragments thereof, will be clear to the skilled person. For example, Helm et al., J Biol Chem 1996 271 7494, describe monomeric Fcε chain variants that can be used in the polypeptide chains of the invention.

[0690] Also, such monomeric Fc chain variants are preferably such that they are still capable of binding to the complement or the relevant Fc receptor(s) (depending on the Fc portion from which they are derived), and/or such that they still have some or all of the effector functions of the Fc portion from which they are derived (or at a reduced level still suitable for the intended use). Alternatively, in such a polypeptide chain of the invention, the monomeric Fc chain may be used to confer increased half-life upon the polypeptide chain, in which case the monomeric Fc chain may also have no or essentially no effector functions.

[0691] Bivalent/multivalent, bispecific/multispecific or biparatopic/multiparatopic polypeptides of the invention may also be linked to Fc portions, in order to provide polypeptide constructs of the type that is described in the non-prepublished U.S. provisional application U.S. 61/005,331 entitled “immunoglobulin constructs” filed on Dec. 4, 2007.

[0692] The further amino acid sequences may also form a signal sequence or leader sequence that directs secretion of the Nanobody or the polypeptide of the invention from a host cell upon synthesis (for example to provide a pre-, pro- or prepro-form of the polypeptide of the invention, depending on the host cell used to express the polypeptide of the invention).

[0693] The further amino acid sequence may also form a sequence or signal that allows the Nanobody or polypeptide of the invention to be directed towards and/or to penetrate or enter into specific organs, tissues, cells, or parts or compartments of cells, and/or that allows the Nanobody or polypeptide of the invention to penetrate or cross a biological barrier such as a cell membrane, a cell layer such as a layer of epithelial cells, a tumor including solid tumors, or the blood-brain-barrier. Suitable examples of such amino acid sequences will be clear to the skilled person, and for example include, but are not limited to, those mentioned on page 118 of WO 08/020,079. For some applications, in particular for those applications in which it is intended to kill a cell that expresses the target against which the Nanobodies of the invention are directed (e.g. in the treatment of cancer), or to reduce or slow the growth and/or proliferation of such a cell, the Nanobodies of the invention may also be linked to a (cyto)toxic protein or polypeptide. Examples of such toxic proteins and polypeptides which can be linked to a Nanobody of the invention to provide—for example—a cytotoxic polypeptide of the invention will be clear to the skilled person and can for example be found in the prior art cited above and/or in the further description herein. One example is the so-called ADEPT™ technology described in WO 03/055527.

[0694] According to one preferred, but non-limiting aspect, said one or more further amino acid sequences comprise at least one further Nanobody, so as to provide a polypeptide of the invention that comprises at least two, such as three, four, five or more Nanobodies, in which said Nanobodies may optionally be linked via one or more linker sequences (as defined herein). As described on pages 119 and 120 of WO 08/020,079, polypeptides of the invention that comprise two or more Nanobodies, of which at least one is a Nanobody of the invention, will also be referred to herein as “multivalent” polypeptides of the invention, and the Nanobodies present in such polypeptides will also be referred to herein as being in a “multivalent format”. For example, “bivalent” and “trivalent” polypeptides of the invention may be as further described on pages 119 and 120 of WO 08/020,079.

[0695] Polypeptides of the invention that contain at least two Nanobodies, in which at least one Nanobody is directed against a first antigen (i.e. against HER3) and at least one Nanobody is directed against a second antigen (i.e. different from HER3), will also be referred to as “multispecific” polypeptides of the invention, and the Nanobodies present in such polypeptides will also be referred to herein as being in a “multispecific format”. Thus, for example, a “bispecific” polypeptide of the invention is a polypeptide that comprises at least one Nanobody directed against a first antigen (i.e. HER3) and at least one further Nanobody directed against a second antigen (i.e. different from HER3), whereas a “trispecific” polypeptide of the invention is a polypeptide that comprises at least one Nanobody directed against a first antigen (i.e. HER3), at least one further Nanobody directed against a second antigen (i.e. different from HER3) and at least one further Nanobody directed against a third antigen (i.e. different from both HER3, and the second antigen); etc.

[0696] Accordingly, in its simplest form, a bispecific polypeptide of the invention is a bivalent polypeptide of the invention (as defined herein), comprising a first Nanobody directed against HER3, and a second Nanobody directed against a second antigen, in which said first and second Nanobody may optionally be linked via a linker sequence (as defined herein); whereas a trispecific polypeptide of the invention in its simplest form is a trivalent polypeptide of the invention (as defined herein), comprising a first Nanobody directed against HER3, a second Nanobody directed against a second antigen and a third Nanobody directed against a third antigen, in which said first, second and third Nanobody may optionally be linked via one or more, and in particular one and more, in particular two, linker sequences.

[0697] However, as will be clear from the description hereinabove, the invention is not limited thereto, in the sense that a multispecific polypeptide of the invention may comprise at least one Nanobody against HER3, and any number of Nanobodies directed against one or more antigens different from HER3.

[0698] Furthermore, although it is encompassed within the scope of the invention that the specific order or arrangement of the various Nanobodies in the polypeptides of the invention may have some influence on the properties of the final polypeptide of the invention (including but not limited to the affinity, specificity or avidity for HER3, or against the one or more other antigens), said order or arrangement is usually not critical and may be suitably chosen by the skilled person, optionally after some limited routine experiments based on the disclosure herein. Thus, when reference is made to a specific multivalent or multispecific polypeptide of the invention, it should be noted that this encompasses any order or arrangements of the relevant Nanobodies, unless explicitly indicated otherwise.

[0699] Finally, it is also within the scope of the invention that the polypeptides of the invention contain two or more Nanobodies and one or more further amino acid sequences (as mentioned herein).

[0700] For multivalent and multispecific polypeptides containing one or more V_{HH} domains and their preparation, reference is also made to Conrath et al., J. Biol. Chem., Vol. 276, 10. 7346-7350, 2001; Muyldermans, Reviews in Molecular Biotechnology 74 (2001), 277-302; as well as to for example WO 96/34103 and WO 99/23221. Some other examples of some specific multispecific and/or multivalent polypeptide of the invention can be found in the applications by Ablynx N.V. referred to herein.

[0701] One preferred, but non-limiting example of a multispecific polypeptide of the invention comprises at least one Nanobody of the invention and at least one Nanobody that provides for an increased half-life. Such Nanobodies may for example be Nanobodies that are directed against a serum protein, and in particular a human serum protein, such as human serum albumin, thyroxine-binding protein, (human) transferrin, fibrinogen, an immunoglobulin such as IgG, IgE or IgM, or against one of the serum proteins listed in WO 04/003019. Of these, Nanobodies that can bind to serum albumin (and in particular human serum albumin) or to IgG (and in particular human IgG, see for example Nanobody VH-1 described in the review by Muyldermans, supra) are particularly preferred (although for example, for experiments in mice or primates, Nanobodies against or cross-reactive with mouse serum albumin (MSA) or serum albumin from said primate, respectively, can be used. However, for pharmaceutical use, Nanobodies against human serum albumin or human IgG will usually be preferred). Nanobodies that provide for increased half-life and that can be used in the polypeptides of the invention include the Nanobodies directed against serum albumin that are described in WO 04/041865, in WO 06/122787 and in the further patent applications by Ablynx N.V., such as those mentioned above.

[0702] For example, some preferred Nanobodies that provide for increased half-life for use in the present invention include Nanobodies that can bind to amino acid residues on (human) serum albumin that are not involved in binding of serum albumin to FcRn (see for example WO 06/0122787); Nanobodies that are capable of binding to amino acid residues on serum albumin that do not form part of domain III of serum albumin (see for example WO 06/0122787); Nanobodies that have or can provide an increased half-life (see for example WO 08/028,977 by Ablynx N.V mentioned herein); Nanobodies against human serum albumin that are cross-reactive with serum albumin from at least one species of mammal, and in particular with at least one species of primate (such as, without limitation, monkeys from the genus Macaca (such as, and in particular, cynomolgus monkeys (Macaca fascicularis) and/or rhesus monkeys (Macaca mulatta)) and baboon (Papio ursinus)) (see for example WO 08/028,977 by Ablynx N.V)); Nanobodies that can bind to serum albumin in a pH independent manner (see for example WO2008/043821 by Ablynx N.V. mentioned herein) and/or Nanobodies that are conditional binders (see for example WO 08/043,822 by Ablynx N.V.).

[0703] Some particularly preferred Nanobodies that provide for increased half-life and that can be used in the polypeptides of the invention include the Nanobodies ALB-1 to ALB-10 disclosed in WO 06/122787 (see Tables II and III) of which ALB-8 (SEQ ID NO: 62 in WO 06/122787, see also SEQ ID NO: 11 of this application) is particularly preferred.

[0704] Some preferred, but non-limiting examples of polypeptides of the invention that comprise at least one Nanobody of the invention and at least one Nanobody that provides for increased half-life are given in SEQ ID NO's 147 to 327, more preferably HER3MS00135 (SEQ ID NO:282), HER3MS00212 (SEQ ID NO:319) or HER3MS00215 (SEQ ID NO:322).

[0705] According to a specific, but non-limiting aspect of the invention, the polypeptides of the invention contain, besides the one or more Nanobodies of the invention, at least one Nanobody against human serum albumin.

[0706] Generally, any polypeptides of the invention with increased half-life that contain one or more Nanobodies of the invention, and any derivatives of Nanobodies of the invention or of such polypeptides that have an increased half-life, preferably have a half-life that is at least 1.5 times, preferably at least 2 times, such as at least 5 times, for example at least 10 times or more than 20 times, greater than the half-life of the corresponding Nanobody of the invention per se. For example, such a derivative or polypeptides with increased half-life may have a half-life that is increased with more than 1 hours, preferably more than 2 hours, more preferably more than 6 hours, such as more than 12 hours, or even more than 24, 48 or 72 hours, compared to the corresponding Nanobody of the invention per se.

[0707] In a preferred, but non-limiting aspect of the invention, such derivatives or polypeptides may exhibit a serum half-life in human of at least about 12 hours, preferably at least 24 hours, more preferably at least 48 hours, even more preferably at least 72 hours or more. For example, such derivatives or polypeptides may have a half-life of at least 5 days (such as about 5 to 10 days), preferably at least 9 days (such as about 9 to 14 days), more preferably at least about 10 days (such as about 10 to 15 days), or at least about 11 days (such as about 11 to 16 days), more preferably at least about 12 days (such as about 12 to 18 days or more), or more than 14 days (such as about 14 to 19 days).

[0708] According to one aspect of the invention the polypeptides are capable of binding to one or more molecules which can increase the half-life of the polypeptide in vivo.

[0709] The polypeptides of the invention are stabilised in vivo and their half-life increased by binding to molecules which resist degradation and/or clearance or sequestration. Typically, such molecules are naturally occurring proteins which themselves have a long half-life in vivo.

[0710] In the polypeptides of the invention, the one or more Nanobodies and the one or more polypeptides may be directly linked to each other (as for example described in WO 99/23221) and/or may be linked to each other via one or more suitable spacers or linkers, or any combination thereof.

[0711] Suitable spacers or linkers for use in multivalent and multispecific polypeptides will be clear to the skilled person, and may generally be any linker or spacer used in the art to link amino acid sequences. Preferably, said linker or spacer is suitable for use in constructing proteins or polypeptides that are intended for pharmaceutical use.

[0712] Some particularly preferred spacers include the spacers and linkers that are used in the art to link antibody fragments or antibody domains. These include the linkers mentioned in the general background art cited above, as well as for example linkers that are used in the art to construct diabodies or ScFv fragments (in this respect, however, its should be noted that, whereas in diabodies and in ScFv fragments, the linker sequence used should have a length, a degree of flexibility and other properties that allow the pertinent V_{H} and V_{L} domains to come together to form the complete antigen-binding site, there is no particular limitation on the length or the flexibility of the linker used in the polypeptide of the invention, since each Nanobody by itself forms a complete antigen-binding site).

[0713] For example, a linker may be a suitable amino acid sequence, and in particular amino acid sequences of between 1 and 50, preferably between 1 and 30, such as between 1 and 10 amino acid residues. Some preferred examples of such amino acid sequences include gly-ser linkers, for example of the type (glyₓser_{y})_{z}, such as (for example (gly₄ser)₃ or (gly₃ser₂)₃, as described in WO 99/42077 and the GS30, GS15, GS9 and GS7 linkers described in the applications by Ablynx mentioned herein (see for example WO 06/040153 and WO 06/122825), as well as hinge-like regions, such as the hinge regions of naturally occurring heavy chain antibodies or similar sequences (such as described in WO 94/04678).

[0714] Some other particularly preferred linkers are poly-alanine (such as AAA), as well as the linkers GS30 (SEQ ID NO: 85 in WO 06/122825) and GS9 (SEQ ID NO: 84 in WO 06/122825).

[0715] Other suitable linkers generally comprise organic compounds or polymers, in particular those suitable for use in proteins for pharmaceutical use. For instance, poly(ethyleneglycol) moieties have been used to link antibody domains, see for example WO 04/081026.

[0716] It is encompassed within the scope of the invention that the length, the degree of flexibility and/or other properties of the linker(s) used (although not critical, as it usually is for linkers used in ScFv fragments) may have some influence on the properties of the final polypeptide of the invention, including but not limited to the affinity, specificity or avidity for HER3, or for one or more of the other antigens. Based on the disclosure herein, the skilled person will be able to determine the optimal linker(s) for use in a specific polypeptide of the invention, optionally after some limited routine experiments.

[0717] For example, in multivalent polypeptides of the invention that comprise Nanobodies directed against a multimeric antigen (such as a multimeric receptor or other protein), the length and flexibility of the linker are preferably such that it allows each Nanobody of the invention present in the polypeptide to bind to the antigenic determinant on each of the subunits of the multimer. Similarly, in a multispecific polypeptide of the invention that comprises Nanobodies directed against two or more different antigenic determinants on the same antigen (for example against different epitopes of an antigen and/or against different subunits of a multimeric receptor, channel or protein), the length and flexibility of the linker are preferably such that it allows each Nanobody to bind to its intended antigenic determinant. Again, based on the disclosure herein, the skilled person will be able to determine the optimal linker(s) for use in a specific polypeptide of the invention, optionally after some limited routine experiments.

[0718] It is also within the scope of the invention that the linker(s) used confer one or more other favourable properties or functionality to the polypeptides of the invention, and/or provide one or more sites for the formation of derivatives and/or for the attachment of functional groups (e.g. as described herein for the derivatives of the Nanobodies of the invention). For example, linkers containing one or more charged amino acid residues (see Table A-2 on page 48 of the International application WO 08/020,079) can provide improved hydrophilic properties, whereas linkers that form or contain small epitopes or tags can be used for the purposes of detection, identification and/or purification. Again, based on the disclosure herein, the skilled person will be able to determine the optimal linkers for use in a specific polypeptide of the invention, optionally after some limited routine experiments.

[0719] Finally, when two or more linkers are used in the polypeptides of the invention, these linkers may be the same or different. Again, based on the disclosure herein, the skilled person will be able to determine the optimal linkers for use in a specific polypeptide of the invention, optionally after some limited routine experiments.

[0720] Usually, for easy of expression and production, a polypeptide of the invention will be a linear polypeptide. However, the invention in its broadest sense is not limited thererto. For example, when a polypeptide of the invention comprises three of more Nanobodies, it is possible to link them by use of a linker with three or more “arms”, which each “arm” being linked to a Nanobody, so as to provide a “star-shaped” construct. It is also possible, although usually less preferred, to use circular constructs.

[0721] The invention also comprises derivatives of the polypeptides of the invention, which may be essentially analogous to the derivatives of the Nanobodies of the invention, i.e. as described herein.

[0722] The invention also comprises proteins or polypeptides that “essentially consist” of a polypeptide of the invention (in which the wording “essentially consist of” has essentially the same meaning as indicated above).

[0723] According to one aspect of the invention, the polypeptide of the invention is in essentially isolated from, as defined herein.

[0724] The amino acid sequences, Nanobodies, polypeptides and nucleic acids of the invention can be prepared in a manner known per se, as will be clear to the skilled person from the further description herein. For example, the Nanobodies and polypeptides of the invention can be prepared in any manner known per se for the preparation of antibodies and in particular for the preparation of antibody fragments (including but not limited to (single) domain antibodies and ScFv fragments). Some preferred, but non-limiting methods for preparing the amino acid sequences, ISV's, Nanobodies, polypeptides and nucleic acids include the methods and techniques described herein.

[0725] As will be clear to the skilled person, one particularly useful method for preparing an amino acid sequence, ISV, Nanobody and/or a polypeptide of the invention generally comprises the steps of:
[0726] i) the expression, in a suitable host cell or host organism (also referred to herein as a “host of the invention”) or in another suitable expression system of a nucleic acid that encodes said amino acid sequence, ISV, Nanobody or polypeptide of the invention (also referred to herein as a “nucleic acid of the invention”), optionally followed by:
[0727] ii) isolating and/or purifying the amino acid sequence, ISV, Nanobody or polypeptide of the invention thus obtained.

[0728] In particular, such a method may comprise the steps of:
[0729] i) cultivating and/or maintaining a host of the invention under conditions that are such that said host of the invention expresses and/or produces at least one amino acid sequence, ISV, Nanobody and/or polypeptide of the invention; optionally followed by:
[0730] ii) isolating and/or purifying the amino acid sequence, ISV, Nanobody or polypeptide of the invention thus obtained.

[0731] A nucleic acid of the invention can be in the form of single or double stranded DNA or RNA, and is preferably in the form of double stranded DNA. For example, the nucleotide sequences of the invention may be genomic DNA, cDNA or synthetic DNA (such as DNA with a codon usage that has been specifically adapted for expression in the intended host cell or host organism).

[0732] According to one aspect of the invention, the nucleic acid of the invention is in essentially isolated from, as defined herein.

[0733] The nucleic acid of the invention may also be in the form of, be present in and/or be part of a vector, such as for example a plasmid, cosmid or YAC, which again may be in essentially isolated form.

[0734] The nucleic acids of the invention can be prepared or obtained in a manner known per se, based on the information on the amino acid sequences for the polypeptides of the invention given herein, and/or can be isolated from a suitable natural source. To provide analogs, nucleotide sequences encoding naturally occurring V_{HH} domains can for example be subjected to site-directed mutagenesis, so at to provide a nucleic acid of the invention encoding said analog. Also, as will be clear to the skilled person, to prepare a nucleic acid of the invention, also several nucleotide sequences, such as at least one nucleotide sequence encoding a Nanobody and for example nucleic acids encoding one or more linkers can be linked together in a suitable manner.

[0735] Techniques for generating the nucleic acids of the invention will be clear to the skilled person and may for instance include, but are not limited to, automated DNA synthesis; site-directed mutagenesis; combining two or more naturally occurring and/or synthetic sequences (or two or more parts thereof), introduction of mutations that lead to the expression of a truncated expression product; introduction of one or more restriction sites (e.g. to create cassettes and/or regions that may easily be digested and/or ligated using suitable restriction enzymes), and/or the introduction of mutations by means of a PCR reaction using one or more “mismatched” primers, using for example a sequence of a naturally occurring form of HER3 as a template. These and other techniques will be clear to the skilled person, and reference is again made to the standard handbooks, such as Sambrook et al. and Ausubel et al., mentioned above, as well as the Examples below.

[0736] The nucleic acid of the invention may also be in the form of, be present in and/or be part of a genetic construct, as will be clear to the person skilled in the art and as described on pages 131-134 of WO 08/020,079 (incorporated herein by reference). Such genetic constructs generally comprise at least one nucleic acid of the invention that is optionally linked to one or more elements of genetic constructs known per se, such as for example one or more suitable regulatory elements (such as a suitable promoter(s), enhancer(s), terminator(s), etc.) and the further elements of genetic constructs referred to herein. Such genetic constructs comprising at least one nucleic acid of the invention will also be referred to herein as “genetic constructs of the invention”.

[0737] The genetic constructs of the invention may be DNA or RNA, and are preferably double-stranded DNA. The genetic constructs of the invention may also be in a form suitable for transformation of the intended host cell or host organism, in a form suitable for integration into the genomic DNA of the intended host cell or in a form suitable for independent replication, maintenance and/or inheritance in the intended host organism. For instance, the genetic constructs of the invention may be in the form of a vector, such as for example a plasmid, cosmid, YAC, a viral vector or transposon. In particular, the vector may be an expression vector, i.e. a vector that can provide for expression in vitro and/or in vivo (e.g. in a suitable host cell, host organism and/or expression system).

[0738] In a preferred but non-limiting aspect, a genetic construct of the invention comprises
[0739] i) at least one nucleic acid of the invention; operably connected to
[0740] ii) one or more regulatory elements, such as a promoter and optionally a suitable terminator;
   and optionally also
[0741] iii) one or more further elements of genetic constructs known per se;

[0742] in which the terms “operably connected” and “operably linked” have the meaning given on pages 131-134 of WO 08/020,079; and in which the “regulatory elements”, “promoter”, “terminator” and “further elements” are as described on pages 131-134 of WO 08/020,079; and in which the genetic constructs may further be as described on pages 131-134 of WO 08/020,079.

[0743] The nucleic acids of the invention and/or the genetic constructs of the invention may be used to transform a host cell or host organism, i.e. for expression and/or production of the amino acid sequence, ISV, Nanobody or polypeptide of the invention. Suitable hosts or host cells will be clear to the skilled person, and may for example be any suitable fungal, prokaryotic or eukaryotic cell or cell line or any suitable fungal, prokaryotic or eukaryotic organism, for example those described on pages 134 and 135 of WO 08/020,079; as well as all other hosts or host cells known per se for the expression and production of antibodies and antibody fragments (including but not limited to (single) domain antibodies and ScFv fragments), which will be clear to the skilled person. Reference is also made to the general background art cited hereinabove, as well as to for example WO 94/29457; WO 96/34103; WO 99/42077; Frenken et al., (1998), supra; Riechmann and Muyldermans, (1999), supra; van der Linden, (2000), supra; Thomassen et al., (2002), supra; Joosten et al., (2003), supra; Joosten et al., (2005), supra; and the further references cited herein.

[0744] The amino acid sequences, Nanobodies and polypeptides of the invention can also be introduced and expressed in one or more cells, tissues or organs of a multicellular organism, for example for prophylactic and/or therapeutic purposes (e.g. as a gene therapy), as further described on pages 135 and 136 of in WO 08/020,079, and in the further references cited in WO 08/020,079.

[0745] For expression of the ISV or Nanobodies in a cell, they may also be expressed as so-called “intrabodies”, as for example described in WO 94/02610, WO 95/22618 and U.S. Pat. No. 7,004,940; WO 03/014960; in Cattaneo, A. & Biocca, S. (1997) Intracellular Antibodies: Development and Applications. Landes and Springer-Verlag; and in Kontermann, Methods 34, (2004), 163-170.

[0746] The amino acid sequences, ISV, Nanobodies and polypeptides of the invention can for example also be produced in the milk of transgenic mammals, for example in the milk of rabbits, cows, goats or sheep (see for example U.S. Pat. No. 6,741,957, U.S. Pat. No. 6,304,489 and U.S. Pat. No. 6,849,992 for general techniques for introducing transgenes into mammals), in plants or parts of plants including but not limited to their leaves, flowers, fruits, seed, roots or turbers (for example in tobacco, maize, soybean or alfalfa) or in for example pupae of the silkworm Bombix mori.

[0747] Furthermore, the amino acid sequences, ISV, Nanobodies and polypeptides of the invention can also be expressed and/or produced in cell-free expression systems, and suitable examples of such systems will be clear to the skilled person. Some preferred, but non-limiting examples include expression in the wheat germ system; in rabbit reticulocyte lysates; or in the E. coli Zubay system.

[0748] As mentioned above, one of the advantages of the use of ISV or Nanobodies is that the polypeptides based thereon can be prepared through expression in a suitable bacterial system, and suitable bacterial expression systems, vectors, host cells, regulatory elements, etc., will be clear to the skilled person, for example from the references cited above. It should however be noted that the invention in its broadest sense is not limited to expression in bacterial systems.

[0749] Preferably, in the invention, an (in vivo or in vitro) expression system, such as a bacterial expression system, is used that provides the polypeptides of the invention in a form that is suitable for pharmaceutical use, and such expression systems will again be clear to the skilled person. As also will be clear to the skilled person, polypeptides of the invention suitable for pharmaceutical use can be prepared using techniques for peptide synthesis.

[0750] For production on industrial scale, preferred heterologous hosts for the (industrial) production of ISV's, Nanobodies or Nanobody-containing protein therapeutics include strains of E. coli, Pichia pastoris, S. cerevisiae that are suitable for large scale expression/production/fermentation, and in particular for large scale pharmaceutical (i.e. GMP grade) expression/production/fermentation. Suitable examples of such strains will be clear to the skilled person. Such strains and production/expression systems are also made available by companies such as Biovitrum (Uppsala, Sweden).

[0751] Alternatively, mammalian cell lines, in particular Chinese hamster ovary (CHO) cells, can be used for large scale expression/production/fermentation, and in particular for large scale pharmaceutical expression/production/fermentation. Again, such expression/production systems are also made available by some of the companies mentioned above.

[0752] The choice of the specific expression system would depend in part on the requirement for certain post-translational modifications, more specifically glycosylation. The production of an ISV- or Nanobody-containing recombinant protein for which glycosylation is desired or required would necessitate the use of mammalian expression hosts that have the ability to glycosylate the expressed protein. In this respect, it will be clear to the skilled person that the glycosylation pattern obtained (i.e. the kind, number and position of residues attached) will depend on the cell or cell line that is used for the expression. Preferably, either a human cell or cell line is used (i.e. leading to a protein that essentially has a human glycosylation pattern) or another mammalian cell line is used that can provide a glycosylation pattern that is essentially and/or functionally the same as human glycosylation or at least mimics human glycosylation. Generally, prokaryotic hosts such as E. coli do not have the ability to glycosylate proteins, and the use of lower eukaryotes such as yeast usually leads to a glycosylation pattern that differs from human glycosylation. Nevertheless, it should be understood that all the foregoing host cells and expression systems can be used in the invention, depending on the desired amino acid sequence, ISV, Nanobody or polypeptide to be obtained.

[0753] Thus, according to one non-limiting aspect of the invention, the amino acid sequence, ISV, Nanobody or polypeptide of the invention is glycosylated. According to another non-limiting aspect of the invention, the amino acid sequence, ISV, Nanobody or polypeptide of the invention is non-glycosylated.

[0754] According to one preferred, but non-limiting aspect of the invention, the amino acid sequence, ISV, Nanobody or polypeptide of the invention is produced in a bacterial cell, in particular a bacterial cell suitable for large scale pharmaceutical production, such as cells of the strains mentioned above.

[0755] According to another preferred, but non-limiting aspect of the invention, the amino acid sequence, ISV, Nanobody or polypeptide of the invention is produced in a yeast cell, in particular a yeast cell suitable for large scale pharmaceutical production, such as cells of the species mentioned above.

[0756] According to yet another preferred, but non-limiting aspect of the invention, the amino acid sequence, ISV, Nanobody or polypeptide of the invention is produced in a mammalian cell, in particular in a human cell or in a cell of a human cell line, and more in particular in a human cell or in a cell of a human cell line that is suitable for large scale pharmaceutical production, such as the cell lines mentioned hereinabove.

[0757] As further described on pages 138 and 139 of WO 08/020,079, when expression in a host cell is used to produce the amino acid sequences, ISV's, Nanobodies and the polypeptides of the invention, the amino acid sequences, ISV's, Nanobodies and polypeptides of the invention can be produced either intracellullarly (e.g. in the cytosol, in the periplasma or in inclusion bodies) and then isolated from the host cells and optionally further purified; or can be produced extracellularly (e.g. in the medium in which the host cells are cultured) and then isolated from the culture medium and optionally further purified. Thus, according to one non-limiting aspect of the invention, the amino acid sequence, ISV, Nanobody or polypeptide of the invention is an amino acid sequence, ISV, Nanobody or polypeptide that has been produced intracellularly and that has been isolated from the host cell, and in particular from a bacterial cell or from an inclusion body in a bacterial cell. According to another non-limiting aspect of the invention, the amino acid sequence, ISV, Nanobody or polypeptide of the invention is an amino acid sequence, ISV, Nanobody or polypeptide that has been produced extracellularly, and that has been isolated from the medium in which the host cell is cultivated.

[0758] Some preferred, but non-limiting promoters for use with these host cells include those mentioned on pages 139 and 140 of WO 08/020,079.

[0759] Some preferred, but non-limiting secretory sequences for use with these host cells include those mentioned on page 140 of WO 08/020,079.

[0760] Suitable techniques for transforming a host or host cell of the invention will be clear to the skilled person and may depend on the intended host cell/host organism and the genetic construct to be used. Reference is again made to the handbooks and patent applications mentioned above.

[0761] After transformation, a step for detecting and selecting those host cells or host organisms that have been successfully transformed with the nucleotide sequence/genetic construct of the invention may be performed. This may for instance be a selection step based on a selectable marker present in the genetic construct of the invention or a step involving the detection of the amino acid sequence of the invention, e.g. using specific antibodies.

[0762] The transformed host cell (which may be in the form or a stable cell line) or host organisms (which may be in the form of a stable mutant line or strain) form further aspects of the present invention.

[0763] Preferably, these host cells or host organisms are such that they express, or are (at least) capable of expressing (e.g. under suitable conditions), an amino acid sequence, ISV, Nanobody or polypeptide of the invention (and in case of a host organism: in at least one cell, part, tissue or organ thereof). The invention also includes further generations, progeny and/or offspring of the host cell or host organism of the invention, that may for instance be obtained by cell division or by sexual or asexual reproduction.

[0764] To produce/obtain expression of the amino acid sequences of the invention, the transformed host cell or transformed host organism may generally be kept, maintained and/or cultured under conditions such that the (desired) amino acid sequence, ISV, Nanobody or polypeptide of the invention is expressed/produced. Suitable conditions will be clear to the skilled person and will usually depend upon the host cell/host organism used, as well as on the regulatory elements that control the expression of the (relevant) nucleotide sequence of the invention. Again, reference is made to the handbooks and patent applications mentioned above in the paragraphs on the genetic constructs of the invention.

[0765] Generally, suitable conditions may include the use of a suitable medium, the presence of a suitable source of food and/or suitable nutrients, the use of a suitable temperature, and optionally the presence of a suitable inducing factor or compound (e.g. when the nucleotide sequences of the invention are under the control of an inducible promoter); all of which may be selected by the skilled person. Again, under such conditions, the amino acid sequences of the invention may be expressed in a constitutive manner, in a transient manner, or only when suitably induced.

[0766] It will also be clear to the skilled person that the amino acid sequence, ISV, Nanobody or polypeptide of the invention may (first) be generated in an immature form (as mentioned above), which may then be subjected to post-translational modification, depending on the host cell/host organism used. Also, the amino acid sequence, ISV, Nanobody or polypeptide of the invention may be glycosylated, again depending on the host cell/host organism used.

[0767] The amino acid sequence, ISV, Nanobody or polypeptide of the invention may then be isolated from the host cell/host organism and/or from the medium in which said host cell or host organism was cultivated, using protein isolation and/or purification techniques known per se, such as (preparative) chromatography and/or electrophoresis techniques, differential precipitation techniques, affinity techniques (e.g. using a specific, cleavable amino acid sequence fused with the amino acid sequence, ISV, Nanobody or polypeptide of the invention) and/or preparative immunological techniques (i.e. using antibodies against the amino acid sequence to be isolated).

[0768] Generally, for pharmaceutical use, the polypeptides of the invention may be formulated as a pharmaceutical preparation or compositions comprising at least one polypeptide of the invention and at least one pharmaceutically acceptable carrier, diluent or excipient and/or adjuvant, and optionally one or more further pharmaceutically active polypeptides and/or compounds. By means of non-limiting examples, such a formulation may be in a form suitable for oral administration, for parenteral administration (such as by intravenous, intramuscular or subcutaneous injection or intravenous infusion), for topical administration, for administration by inhalation, by a skin patch, by an implant, by a suppository, etc. Such suitable administration forms—which may be solid, semi-solid or liquid, depending on the manner of administration—as well as methods and carriers for use in the preparation thereof, will be clear to the skilled person, and are further described herein.

[0769] Thus, in a further aspect, the invention relates to a pharmaceutical composition that contains at least one amino acid of the invention, at least one ISV of the invention, at least one Nanobody of the invention or at least one polypeptide of the invention and at least one suitable carrier, diluent or excipient (i.e. suitable for pharmaceutical use), and optionally one or more further active substances.

[0770] Generally, the amino acid sequences, ISV's, Nanobodies and polypeptides of the invention can be formulated and administered in any suitable manner known per se, for which reference is for example made to the general background art cited above (and in particular to WO 04/041862, WO 04/041863, WO 04/041865, WO 04/041867 and WO 08/020,079) as well as to the standard handbooks, such as Remington's Pharmaceutical Sciences, 18^{th} Ed., Mack Publishing Company, USA (1990), Remington, the Science and Practice of Pharmacy, 21th Edition, Lippincott Williams and Wilkins (2005); or the Handbook of Therapeutic Antibodies (S. Dubel, Ed.), Wiley, Weinheim, 2007 (see for example pages 252-255).

[0771] For example, the amino acid sequences, ISV's, Nanobodies and polypeptides of the invention may be formulated and administered in any manner known per se for conventional antibodies and antibody fragments (including ScFv's and diabodies) and other pharmaceutically active proteins. Such formulations and methods for preparing the same will be clear to the skilled person, and for example include preparations suitable for parenteral administration (for example intravenous, intraperitoneal, subcutaneous, intramuscular, intraluminal, intra-arterial or intrathecal administration) or for topical (i.e. transdermal or intradermal) administration.

[0772] Preparations for parenteral administration may for example be sterile solutions, suspensions, dispersions or emulsions that are suitable for infusion or injection. Suitable carriers or diluents for such preparations for example include, without limitation, those mentioned on page 143 of WO 08/020,079. Usually, aqueous solutions or suspensions will be preferred.

[0773] The amino acid sequences, ISV's, Nanobodies and polypeptides of the invention can also be administered using gene therapy methods of delivery. See, e.g., U.S. Pat. No. 5,399,346, which is incorporated by reference in its entirety. Using a gene therapy method of delivery, primary cells transfected with the gene encoding an amino acid sequence, ISV, Nanobody or polypeptide of the invention can additionally be transfected with tissue specific promoters to target specific organs, tissue, grafts, tumors, or cells and can additionally be transfected with signal and stabilization sequences for subcellularly localized expression.

[0774] Thus, the amino acid sequences, ISV's, Nanobodies and polypeptides of the invention may be systemically administered, e.g., orally, in combination with a pharmaceutically acceptable vehicle such as an inert diluent or an assimilable edible carrier. They may be enclosed in hard or soft shell gelatin capsules, may be compressed into tablets, or may be incorporated directly with the food of the patient's diet. For oral therapeutic administration, the amino acid sequences, ISV's, Nanobodies and polypeptides of the invention may be combined with one or more excipients and used in the form of ingestible tablets, buccal tablets, troches, capsules, elixirs, suspensions, syrups, wafers, and the like. Such compositions and preparations should contain at least 0.1% of the amino acid sequence, Nanobody or polypeptide of the invention. Their percentage in the compositions and preparations may, of course, be varied and may conveniently be between about 2 to about 60% of the weight of a given unit dosage form. The amount of the amino acid sequence, ISV, Nanobody or polypeptide of the invention in such therapeutically useful compositions is such that an effective dosage level will be obtained.

[0775] The tablets, troches, pills, capsules, and the like may also contain binders, excipients, disintegrating agents, lubricants and sweetening or flavouring agents, for example those mentioned on pages 143-144 of WO 08/020,079. When the unit dosage form is a capsule, it may contain, in addition to materials of the above type, a liquid carrier, such as a vegetable oil or a polyethylene glycol. Various other materials may be present as coatings or to otherwise modify the physical form of the solid unit dosage form. For instance, tablets, pills, or capsules may be coated with gelatin, wax, shellac or sugar and the like. A syrup or elixir may contain the amino acid sequences, ISV's, Nanobodies and polypeptides of the invention, sucrose or fructose as a sweetening agent, methyl and propylparabens as preservatives, a dye and flavoring such as cherry or orange flavor. Of course, any material used in preparing any unit dosage form should be pharmaceutically acceptable and substantially non-toxic in the amounts employed. In addition, the amino acid sequences, ISV's, Nanobodies and polypeptides of the invention may be incorporated into sustained-release preparations and devices.

[0776] Preparations and formulations for oral administration may also be provided with an enteric coating that will allow the constructs of the invention to resist the gastric environment and pass into the intestines. More generally, preparations and formulations for oral administration may be suitably formulated for delivery into any desired part of the gastrointestinal tract. In addition, suitable suppositories may be used for delivery into the gastrointestinal tract.

[0777] The amino acid sequences, ISV's, Nanobodies and polypeptides of the invention may also be administered intravenously or intraperitoneally by infusion or injection, as further described on pages 144 and 145 of WO 08/020,079.

[0778] For topical administration, the amino acid sequences, ISV's, Nanobodies and polypeptides of the invention may be applied in pure form, i.e., when they are liquids. However, it will generally be desirable to administer them to the skin as compositions or formulations, in combination with a dermatologically acceptable carrier, which may be a solid or a liquid, as further described on page 145 of WO 08/020,079.

[0779] Generally, the concentration of the amino acid sequences, ISV's, Nanobodies and polypeptides of the invention in a liquid composition, such as a lotion, will be from about 0.1-25 wt-%, preferably from about 0.5-10 wt-%. The concentration in a semi-solid or solid composition such as a gel or a powder will be about 0.1-5 wt-%, preferably about 0.5-2.5 wt-%.

[0780] The amount of the amino acid sequences, ISV's, Nanobodies and polypeptides of the invention required for use in treatment will vary not only with the particular amino acid sequence, ISV, Nanobody or polypeptide selected but also with the route of administration, the nature of the condition being treated and the age and condition of the patient and will be ultimately at the discretion of the attendant physician or clinician. Also the dosage of the amino acid sequences, ISV's, Nanobodies and polypeptides of the invention varies depending on the target cell, tumor, tissue, graft, or organ.

[0781] The desired dose may conveniently be presented in a single dose or as divided doses administered at appropriate intervals, for example, as two, three, four or more sub-doses per day. The sub-dose itself may be further divided, e.g., into a number of discrete loosely spaced administrations; such as multiple inhalations from an insufflator or by application of a plurality of drops into the eye.

[0782] An administration regimen could include long-term, daily treatment. By “long-term” is meant at least two weeks and preferably, several weeks, months, or years of duration. Necessary modifications in this dosage range may be determined by one of ordinary skill in the art using only routine experimentation given the teachings herein. See Remington's Pharmaceutical Sciences (Martin, E. W., ed. 4), Mack Publishing Co., Easton, Pa. The dosage can also be adjusted by the individual physician in the event of any complication.

[0783] In another aspect, the invention relates to a method for the prevention and/or treatment of at least one variety of cancers, said method comprising administering, to a subject in need thereof, a pharmaceutically active amount of an amino acid sequence of the invention, of an ISV of the invention, of a Nanobody of the invention, of a polypeptide of the invention, and/or of a pharmaceutical composition comprising the same.

[0784] In the context of the present invention, the term “prevention and/or treatment” not only comprises preventing and/or treating the disease, but also generally comprises preventing the onset of the disease, slowing or reversing the progress of disease, preventing or slowing the onset of one or more symptoms associated with the disease, reducing and/or alleviating one or more symptoms associated with the disease, reducing the severity and/or the duration of the disease and/or of any symptoms associated therewith and/or preventing a further increase in the severity of the disease and/or of any symptoms associated therewith, preventing, reducing or reversing any physiological damage caused by the disease, and generally any pharmacological action that is beneficial to the patient being treated.

[0785] The subject to be treated may be any warm-blooded animal, but is in particular a mammal, and more in particular a human being. As will be clear to the skilled person, the subject to be treated will in particular be a person suffering from, or at risk of, the diseases and disorders mentioned herein.

[0786] The invention relates to a method for the prevention and/or treatment of at least one disease or disorder that is associated with HER3, with its biological or pharmacological activity, and/or with the biological pathways or signalling in which HER3 is involved, said method comprising administering, to a subject in need thereof, a pharmaceutically active amount of an amino acid sequence of the invention, of an ISV of the invention, of a Nanobody of the invention, of a polypeptide of the invention, and/or of a pharmaceutical composition comprising the same. In particular, the invention relates to a method for the prevention and/or treatment of at least one disease or disorder that can be treated by modulating HER3, its biological or pharmacological activity, and/or the biological pathways or signalling in which HER3 is involved, said method comprising administering, to a subject in need thereof, a pharmaceutically active amount of an amino acid sequence of the invention, of an ISV of the invention, of a Nanobody of the invention, of a polypeptide of the invention, and/or of a pharmaceutical composition comprising the same. In particular, said pharmaceutically effective amount may be an amount that is sufficient to modulate HER3, its biological or pharmacological activity, and/or the biological pathways or signalling in which HER3 is involved; and/or an amount that provides a level of the amino acid sequence of the invention, of an ISV of the invention, of a Nanobody of the invention, of a polypeptide of the invention in the circulation that is sufficient to modulate HER3, its biological or pharmacological activity, and/or the biological pathways or signalling in which HER3 is involved.

[0787] The invention furthermore relates to a method for the prevention and/or treatment of at least one disease or disorder that can be prevented and/or treated by administering an amino acid sequence of the invention, of an ISV of the invention, a Nanobody of the invention or a polypeptide of the invention to a patient, said method comprising administering, to a subject in need thereof, a pharmaceutically active amount of an amino acid sequence of the invention, of an ISV of the invention, of a Nanobody of the invention, of a polypeptide of the invention, and/or of a pharmaceutical composition comprising the same.

[0788] More in particular, the invention relates to a method for the prevention and/or treatment of at least one disease or disorder chosen from the group consisting of the diseases and disorders listed herein, said method comprising administering, to a subject in need thereof, a pharmaceutically active amount of an amino acid sequence of the invention, of an ISV of the invention, of a Nanobody of the invention, of a polypeptide of the invention, and/or of a pharmaceutical composition comprising the same.

[0789] In another aspect, the invention relates to a method for immunotherapy, and in particular for passive immunotherapy, which method comprises administering, to a subject suffering from or at risk of the diseases and disorders mentioned herein, a pharmaceutically active amount of an amino acid sequence of the invention, of an ISV of the invention, of a Nanobody of the invention, of a polypeptide of the invention, and/or of a pharmaceutical composition comprising the same.

[0790] In the above methods, the amino acid sequences, ISV's, Nanobodies and/or polypeptides of the invention and/or the compositions comprising the same can be administered in any suitable manner, depending on the specific pharmaceutical formulation or composition to be used. Thus, the amino acid sequences, ISV's, Nanobodies and/or polypeptides of the invention and/or the compositions comprising the same can for example be administered orally, intraperitoneally (e.g. intravenously, subcutaneously, intramuscularly, or via any other route of administration that circumvents the gastrointestinal tract), intranasally, transdermally, topically, by means of a suppository, by inhalation, again depending on the specific pharmaceutical formulation or composition to be used. The clinician will be able to select a suitable route of administration and a suitable pharmaceutical formulation or composition to be used in such administration, depending on the disease or disorder to be prevented or treated and other factors well known to the clinician.

[0791] The amino acid sequences, ISV's, Nanobodies and/or polypeptides of the invention and/or the compositions comprising the same are administered according to a regime of treatment that is suitable for preventing and/or treating the disease or disorder to be prevented or treated. The clinician will generally be able to determine a suitable treatment regimen, depending on factors such as the disease or disorder to be prevented or treated, the severity of the disease to be treated and/or the severity of the symptoms thereof, the specific amino acid sequence, ISV, Nanobody or polypeptide of the invention to be used, the specific route of administration and pharmaceutical formulation or composition to be used, the age, gender, weight, diet, general condition of the patient, and similar factors well known to the clinician.

[0792] Generally, the treatment regimen will comprise the administration of one or more amino acid sequences, ISV's, Nanobodies and/or polypeptides of the invention, or of one or more compositions comprising the same, in one or more pharmaceutically effective amounts or doses. The specific amount(s) or doses to administered can be determined by the clinician, again based on the factors cited above.

[0793] Generally, for the prevention and/or treatment of the diseases and disorders mentioned herein and depending on the specific disease or disorder to be treated, the potency of the specific amino acid sequence, ISV, Nanobody and polypeptide of the invention to be used, the specific route of administration and the specific pharmaceutical formulation or composition used, the amino acid sequences, ISV's, Nanobodies and polypeptides of the invention will generally be administered in an amount between 1 gram and 0.01 milligram per kg body weight per day, preferably between 0.1 gram and 0.01 milligram per kg body weight per day, such as about 0.1, 1, 10, 100 or 1000 milligram per kg body weight per day, either continuously (e.g. by infusion), as a single daily dose or as multiple divided doses during the day. The clinician will generally be able to determine a suitable daily dose, depending on the factors mentioned herein. It will also be clear that in specific cases, the clinician may choose to deviate from these amounts, for example on the basis of the factors cited above and his expert judgment. Generally, some guidance on the amounts to be administered can be obtained from the amounts usually administered for comparable conventional antibodies or antibody fragments against the same target administered via essentially the same route, taking into account however differences in affinity/avidity, efficacy, biodistribution, half-life and similar factors well known to the skilled person.

[0794] Usually, in the above method, a single amino acid sequence, ISV, Nanobody or polypeptide of the invention will be used. It is however within the scope of the invention to use two or more amino acid sequences, ISV's, Nanobodies and/or polypeptides of the invention in combination.

[0795] The ISV's, Nanobodies, amino acid sequences and polypeptides of the invention may also be used in combination with one or more further pharmaceutically active compounds or principles, i.e. as a combined treatment regimen, which may or may not lead to a synergistic effect. Again, the clinician will be able to select such further compounds or principles, as well as a suitable combined treatment regimen, based on the factors cited above and his expert judgement.

[0796] In particular, the amino acid sequences, ISV's, Nanobodies and polypeptides of the invention may be used in combination with other pharmaceutically active compounds or principles that are or can be used for the prevention and/or treatment of the diseases and disorders cited herein, as a result of which a synergistic effect may or may not be obtained. Examples of such compounds and principles, as well as routes, methods and pharmaceutical formulations or compositions for administering them will be clear to the clinician.

[0797] When two or more substances or principles are to be used as part of a combined treatment regimen, they can be administered via the same route of administration or via different routes of administration, at essentially the same time or at different times (e.g. essentially simultaneously, consecutively, or according to an alternating regime). When the substances or principles are to be administered simultaneously via the same route of administration, they may be administered as different pharmaceutical formulations or compositions or part of a combined pharmaceutical formulation or composition, as will be clear to the skilled person.

[0798] Also, when two or more active substances or principles are to be used as part of a combined treatment regimen, each of the substances or principles may be administered in the same amount and according to the same regimen as used when the compound or principle is used on its own, and such combined use may or may not lead to a synergistic effect. However, when the combined use of the two or more active substances or principles leads to a synergistic effect, it may also be possible to reduce the amount of one, more or all of the substances or principles to be administered, while still achieving the desired therapeutic action. This may for example be useful for avoiding, limiting or reducing any unwanted side-effects that are associated with the use of one or more of the substances or principles when they are used in their usual amounts, while still obtaining the desired pharmaceutical or therapeutic effect.

[0799] The effectiveness of the treatment regimen used according to the invention may be determined and/or followed in any manner known per se for the disease or disorder involved, as will be clear to the clinician. The clinician will also be able, where appropriate and on a case-by-case basis, to change or modify a particular treatment regimen, so as to achieve the desired therapeutic effect, to avoid, limit or reduce unwanted side-effects, and/or to achieve an appropriate balance between achieving the desired therapeutic effect on the one hand and avoiding, limiting or reducing undesired side effects on the other hand.

[0800] Generally, the treatment regimen will be followed until the desired therapeutic effect is achieved and/or for as long as the desired therapeutic effect is to be maintained. Again, this can be determined by the clinician.

[0801] In another aspect, the invention relates to the use of an amino acid sequence, ISV, Nanobody or polypeptide of the invention in the preparation of a pharmaceutical composition for prevention and/or treatment of at least one variety of cancers; and/or for use in one or more of the methods of treatment mentioned herein.

[0802] The subject to be treated may be any warm-blooded animal, but is in particular a mammal, and more in particular a human being. As will be clear to the skilled person, the subject to be treated will in particular be a person suffering from, or at risk of, the diseases and disorders mentioned herein.

[0803] The invention also relates to the use of an amino acid sequence, ISV, Nanobody or polypeptide of the invention in the preparation of a pharmaceutical composition for the prevention and/or treatment of at least one disease or disorder that can be prevented and/or treated by administering an amino acid sequence, ISV, Nanobody or polypeptide of the invention to a patient.

[0804] More in particular, the invention relates to the use of an amino acid sequence, ISV, Nanobody or polypeptide of the invention in the preparation of a pharmaceutical composition for the prevention and/or treatment of variety of cancers, and in particular for the prevention and treatment of one or more of the diseases and disorders listed herein.

[0805] Again, in such a pharmaceutical composition, the one or more amino acid sequences, ISV's, Nanobodies or polypeptides of the invention may also be suitably combined with one or more other active principles, such as those mentioned herein.

[0806] Finally, although the use of the ISV's or Nanobodies of the invention (as defined herein) and of the polypeptides of the invention is much preferred, it will be clear that on the basis of the description herein, the skilled person will also be able to design and/or generate, in an analogous manner, other amino acid sequences and in particular (single) domain antibodies against HER3, as well as polypeptides comprising such (single) domain antibodies.

[0807] For example, it will also be clear to the skilled person that it may be possible to “graft” one or more of the CDR's mentioned above for the Nanobodies of the invention onto such (single) domain antibodies or other protein scaffolds, including but not limited to human scaffolds or non-immunoglobulin scaffolds. Suitable scaffolds and techniques for such CDR grafting will be clear to the skilled person and are well known in the art, see for example those mentioned in WO 08/020,079. For example, techniques known per se for grafting mouse or rat CDR's onto human frameworks and scaffolds can be used in an analogous manner to provide chimeric proteins comprising one or more of the CDR's of the Nanobodies of the invention and one or more human framework regions or sequences.

[0808] It should also be noted that, when the Nanobodies of the inventions contain one or more other CDR sequences than the preferred CDR sequences mentioned above, these CDR sequences can be obtained in any manner known per se, for example using one or more of the techniques described in WO 08/020,079.

[0809] Further uses of the amino acid sequences, ISV's, Nanobodies, polypeptides, nucleic acids, genetic constructs and hosts and host cells of the invention will be clear to the skilled person based on the disclosure herein. For example, and without limitation, the amino acid sequences of the invention can be linked to a suitable carrier or solid support so as to provide a medium than can be used in a manner known per se to purify HER3 from compositions and preparations comprising the same. Derivatives of the amino acid sequences of the invention that comprise a suitable detectable label can also be used as markers to determine (qualitatively or quantitatively) the presence of HER3 in a composition or preparation or as a marker to selectively detect the presence of HER3 on the surface of a cell or tissue (for example, in combination with suitable cell sorting techniques).

[0810] The invention will now be further described by means of the following non-limiting preferred aspects, examples and figures:

### Preferred Aspects:

[0811] Aspect A-1: An immunoglobulin single variable domain that is directed against and/or that can specifically bind to HER3.
[0812] Aspect A-2: An immunoglobulin single variable domain according to aspect A-1, that is in essentially isolated form.
[0813] Aspect A-3: An immunoglobulin single variable domain according to aspect A-1 or A-2, for administration to a subject, wherein said immunoglobulin single variable domain does not naturally occur in said subject.
[0814] Aspect A-4: An immunoglobulin single variable domain that can specifically bind to HER3 with a dissociation constant (K_{D}) of 10⁻⁵ to 10⁻¹² moles/litre or less, and preferably 10⁻⁷ to 10⁻¹² moles/litre or less and more preferably 10⁻⁸ to 10⁻¹² moles/litre. Such an immunoglobulin single variable domain may in particular be an immunoglobulin single variable domain according to any of the preceding aspects.
[0815] Aspect A-5: An immunoglobulin single variable domain that can specifically bind to HER3 with a rate of association (kₒₙ-rate) of between 10² M⁻¹s⁻¹ to about 10⁷ M⁻¹s⁻¹, preferably between 10³ M⁻¹s⁻¹ and 10⁷ M⁻¹s⁻¹, more preferably between 10⁴ M⁻¹s⁻¹ and 10⁷ M⁻¹s⁻¹, such as between 10⁵ M⁻¹s⁻¹ and 10⁷ M⁻¹s⁻¹. Such an immunoglobulin single variable domain may in particular be an immunoglobulin single variable domain according to any of the preceding aspects.
[0816] Aspect A-6: An immunoglobulin single variable domain that can specifically bind to HER3 with a rate of dissociation (k_{off} rate) between 1 s⁻¹ and 10⁻⁶ s⁻¹, preferably between 10⁻² s⁻¹ and 10⁻⁶ s⁻¹, more preferably between 10⁻³ s⁻¹ and 10⁻⁶ s⁻¹, such as between 10⁻⁴ s⁻¹ and 10⁻⁶ s⁻¹. Such an immunoglobulin single variable domain may in particular be an immunoglobulin single variable domain according to any of the preceding aspects.
[0817] Aspect A-7: An immunoglobulin single variable domain that can specifically bind to HER3 with an affinity less than 500 nM, preferably less than 200 nM, more preferably less than 10 nM, such as less than 1 nM. Such an immunoglobulin single variable domain may in particular be an immunoglobulin single variable domain according to any of the preceding aspects.
[0818] Aspect A-8: An immunoglobulin single variable domain according to any of the preceding aspects, that is a naturally occurring immunoglobulin single variable domain (from any suitable species) or a synthetic or semi-synthetic immunoglobulin single variable domain.
[0819] Aspect A-9: An immunoglobulin single variable domain according to any of the preceding aspects, that comprises an immunoglobulin fold or that under suitable conditions is capable of forming an immunoglobulin fold.
[0820] Aspect A-10: An immunoglobulin single variable domain according to any of the preceding aspects, that essentially consists of 4 framework regions (FR1 to FR4 respectively) and 3 complementarity determining regions (CDR1 to CDR3 respectively).
[0821] Aspect A-11: An immunoglobulin single variable domain according to any of the preceding aspects, that is an immunoglobulin sequence.
[0822] Aspect A-12: An immunoglobulin single variable domain according to any of the preceding aspects, that is a naturally occurring immunoglobulin sequence (from any suitable species) or a synthetic or semi-synthetic immunoglobulin sequence.
[0823] Aspect A-13: An immunoglobulin single variable domain according to any of the preceding aspects that is a humanized immunoglobulin sequence, a camelized immunoglobulin sequence or an immunoglobulin sequence that has been obtained by techniques such as affinity maturation.
[0824] Aspect A-14: An immunoglobulin single variable domain according to any of the preceding aspects, that essentially consists of a light chain variable domain sequence (e.g. a VL-sequence); or of a heavy chain variable domain sequence (e.g. a VH-sequence).
[0825] Aspect A-15: An immunoglobulin single variable domain according to any of the preceding aspects, that essentially consists of a heavy chain variable domain sequence that is derived from a conventional four-chain antibody or that essentially consists of a heavy chain variable domain sequence that is derived from a heavy chain antibody.
[0826] Aspect A-16: An immunoglobulin single variable domain according to any of the preceding aspects, that essentially consists of a domain antibody (or an immunoglobulin single variable domain that is suitable for use as a domain antibody), of a single domain antibody (or an immunoglobulin single variable domain that is suitable for use as a single domain antibody), of a “dAb” (or an immunoglobulin single variable domain that is suitable for use as a dAb) or of a Immunoglobulin single variable domain (including but not limited to a VHH sequence).
[0827] Aspect A-17: An immunoglobulin single variable domain according to any of the preceding aspects, that essentially consists of an immunoglobulin single variable domain.
[0828] Aspect A-18: An immunoglobulin single variable domain according to any of the preceding aspects, that essentially consists of an immunoglobulin single variable domain that has preferably one or more of the amino acid residues at positions 11, 37, 44, 45, 47, 83, 84, 103, 104 and 108 according to the Kabat numbering chosen from the Hallmark residues mentioned in Table B-2.
[0829] Aspect A-19: An immunoglobulin single variable domain according to any of the preceding aspects, that essentially consists of a polypeptide that
   [0830] i) has at least 80% amino acid identity with at least one of the immunoglobulin single variable domains of SEQ ID NO's: 12 to 26, in which for the purposes of determining the degree of amino acid identity, the amino acid residues that form the CDR sequences are disregarded;
   [0831] and in which:
   [0832] ii) preferably one or more of the amino acid residues at positions 11, 37, 44, 45, 47, 83, 84, 103, 104 and 108 according to the Kabat numbering are chosen from the Hallmark residues mentioned in Table B-2.
[0833] Aspect A-20: An immunoglobulin single variable domain according to any of the preceding aspects, that essentially consists of an immunoglobulin single variable domain that
   [0834] i) has at least 80% amino acid identity with at least one of the immunoglobulin single variable domains of SEQ ID NO's: 12 to 26, in which for the purposes of determining the degree of amino acid identity, the amino acid residues that form the CDR sequences are disregarded;
   [0835] and in which:
   [0836] ii) preferably one or more of the amino acid residues at positions 11, 37, 44, 45, 47, 83, 84, 103, 104 and 108 according to the Kabat numbering are chosen from the Hallmark residues mentioned in Table B-2.
[0837] Aspect A-21: An immunoglobulin single variable domain according to any of the preceding aspects, that essentially consists of a humanized or otherwise sequence optimized immunoglobulin single variable domain.
[0838] Aspect A-22: An immunoglobulin single variable domain according to any of the preceding aspects, that in addition to the at least one binding site for binding against/to HER3, contains one or more further binding sites for binding against/to other antigens, proteins or targets.
[0839] Aspect B-1: An immunoglobulin single variable domain that is directed against and/or that can specifically bind HER3, and that comprises one or more stretches of amino acid residues chosen from the group consisting of:
   [0840] a) the amino acid sequences of SEQ ID NO's: 57 to 71;
   [0841] b) amino acid sequences that have at least 80% amino acid identity with at least one of the amino acid sequences of SEQ ID NO's: 57 to 71;
   [0842] c) amino acid sequences that have 3, 2, or 1 amino acid difference with at least one of the amino acid sequences of SEQ ID NO's: 57 to 71;
   [0843] d) the amino acid sequences of SEQ ID NO's: 87 to 101;
   [0844] e) amino acid sequences that have at least 80% amino acid identity with at least one of the amino acid sequences of SEQ ID NO's: 87 to 101;
   [0845] f) amino acid sequences that have 3, 2, or 1 amino acid difference with at least one of the amino acid sequences of SEQ ID NO's: 87 to 101;
   [0846] g) the amino acid sequences of SEQ ID NO's: 117 to 131;
   [0847] h) amino acid sequences that have at least 80% amino acid identity with at least one of the amino acid sequences of SEQ ID NO's: 117 to 131;
   [0848] i) amino acid sequences that have 3, 2, or 1 amino acid difference with at least one of the amino acid sequences of SEQ ID NO's: 117 to 131;
   [0849] or any suitable combination thereof.
   [0850] Such an immunoglobulin single variable domain may in particular be an immunoglobulin single variable domain according to any of the aspects A-1 to A-22.
[0851] Aspect B-2: An immunoglobulin single variable domain according to aspect B-1, in which at least one of said stretches of amino acid residues forms part of the antigen binding site for binding against/to HER3.
[0852] Aspect B-3: An immunoglobulin single variable domain sequence that is directed against and/or that can specifically bind HER3 and that comprises two or more stretches of amino acid residues chosen from the group consisting of:
   [0853] a) the amino acid sequences of SEQ ID NO's: 57 to 71;
   [0854] b) amino acid sequences that have at least 80% amino acid identity with at least one of the amino acid sequences of SEQ ID NO's: 57 to 71;
   [0855] c) amino acid sequences that have 3, 2, or 1 amino acid difference with at least one of the amino acid sequences of SEQ ID NO's: 57 to 71;
   [0856] d) the amino acid sequences of SEQ ID NO's: 87 to 101;
   [0857] e) amino acid sequences that have at least 80% amino acid identity with at least one of the amino acid sequences of SEQ ID NO's: 87 to 101;
   [0858] f) amino acid sequences that have 3, 2, or 1 amino acid difference with at least one of the amino acid sequences of SEQ ID NO's: 87 to 101;
   [0859] g) the amino acid sequences of SEQ ID NO's: 117 to 131;
   [0860] h) amino acid sequences that have at least 80% amino acid identity with at least one of the amino acid sequences of SEQ ID NO's: 117 to 131;
   [0861] i) amino acid sequences that have 3, 2, or 1 amino acid difference with at least one of the amino acid sequences of SEQ ID NO's: 117 to 131;
   [0862] such that (i) when the first stretch of amino acid residues corresponds to one of the amino acid sequences according to a), b) or c), the second stretch of amino acid residues corresponds to one of the amino acid sequences according to d), e), f), g), h) or i); (ii) when the first stretch of amino acid residues corresponds to one of the amino acid sequences according to d), e) or f), the second stretch of amino acid residues corresponds to one of the amino acid sequences according to a), b), c), g), h) or i); or (iii) when the first stretch of amino acid residues corresponds to one of the amino acid sequences according to g), h) or i), the second stretch of amino acid residues corresponds to one of the amino acid sequences according to a), b), c), d), e) or f).
   [0863] Such an immunoglobulin single variable domain may in particular be an immunoglobulin single variable domain according to any of the aspects A-1 to A-22, B-1 or B-2.
[0864] Aspect B-4: An immunoglobulin single variable domain according to aspect B-3, in which the at least two stretches of amino acid residues forms part of the antigen binding site for binding against HER3.
   [0865] Aspect B-5: An immunoglobulin single variable domain sequence that is directed against and/or that can specifically bind HER3 and that comprises three or more stretches of amino acid residues, in which the first stretch of amino acid residues is chosen from the group consisting of:
   [0866] a) the amino acid sequences of SEQ ID NO's: 57 to 71;
   [0867] b) amino acid sequences that have at least 80% amino acid identity with at least one of the amino acid sequences of SEQ ID NO's: 57 to 71;
   [0868] c) amino acid sequences that have 3, 2, or 1 amino acid difference with at least one of the amino acid sequences of SEQ ID NO's: 57 to 71;
   [0869] the second stretch of amino acid residues is chosen from the group consisting of:
   [0870] d) the amino acid sequences of SEQ ID NO's: 87 to 101;
   [0871] e) amino acid sequences that have at least 80% amino acid identity with at least one of the amino acid sequences of SEQ ID NO's: 87 to 101;
   [0872] f) amino acid sequences that have 3, 2, or 1 amino acid difference with at least one of the amino acid sequences of SEQ ID NO's: 87 to 101;
   [0873] and the third stretch of amino acid residues is chosen from the group consisting of:
   [0874] g) the amino acid sequences of SEQ ID NO's: 117 to 131;
   [0875] h) amino acid sequences that have at least 80% amino acid identity with at least one of the amino acid sequences of SEQ ID NO's: 117 to 131;
   [0876] i) amino acid sequences that have 3, 2, or 1 amino acid difference with at least one of the amino acid sequences of SEQ ID NO's: 117 to 131.
   [0877] Such an immunoglobulin single variable domain may in particular be an immunoglobulin single variable domain according to any of the aspects A-1 to A-22 and/or B-1 to B-4.
[0878] Aspect B-6: An immunoglobulin single variable domain according to aspect B-5, in which the at least three stretches of amino acid residues forms part of the antigen binding site for binding against/to HER3.
[0879] Aspect B-7: An immunoglobulin single variable domain that is directed against and/or that can specifically bind HER3 in which the CDR sequences of said immunoglobulin single variable domain have at least 70% amino acid identity, preferably at least 80% amino acid identity, more preferably at least 90% amino acid identity, such as 95% amino acid identity or more or even essentially 100% amino acid identity with the CDR sequences of at least one of the immunoglobulin single variable domains of SEQ ID NO's: 12 to 26. Such an immunoglobulin single variable domain may in particular be an immunoglobulin single variable domain according to any of the aspects A-1 to A-22 and/or B-1 to B-6.
[0880] Aspect C-1: An immunoglobulin single variable domain that is directed against HER3 and that cross-blocks the binding of at least one of the immunoglobulin single variable domains of SEQ ID NO's: 12 to 26 to HER3. Such an immunoglobulin single variable domain may in particular be an immunoglobulin single variable domain according to any of the aspects A-1 to A-22 and/or according to aspects B-1 to B-7. Also, preferably, such an immunoglobulin single variable domain is able to specifically bind to HER3.
[0881] Aspect C-2: An immunoglobulin single variable domain that is directed against HER3 and that is cross-blocked from binding to HER3 by at least one of the immunoglobulin single variable domains of SEQ ID NO's: 12 to 26. Such an immunoglobulin single variable domain may in particular be an immunoglobulin single variable domain according to any of the aspects A-1 to A-22 and/or according to aspects B-1 to B-7. Also, preferably, such an immunoglobulin single variable domain is able to specifically bind to HER3.
[0882] Aspect C-3: An immunoglobulin single variable domain according to any of aspects C-1 or C-2, wherein the ability of said immunoglobulin single variable domain to cross-block or to be cross-blocked is detected in a FACS competition assay, e.g. as described in the experimental part.
[0883] Aspect C-4: An immunoglobulin single variable domain according to any of aspects C-1 to C-3, wherein the ability of said immunoglobulin single variable domain to cross-block or to be cross-blocked is detected in an ELISA assay.
[0884] Aspect D-1: An immunoglobulin single variable domain according to any of aspects B-1 to B-7 or C-1 to C-4, that is in essentially isolated form.
[0885] Aspect D-2: An immunoglobulin single variable domain according to any of aspects B-1 to B-7, C-1 to C-4, and/or D1 for administration to a subject, wherein said immunoglobulin single variable domain does not naturally occur in said subject.
[0886] Aspect D-3: An immunoglobulin single variable domain according to any of aspects B-1 to B-7, C-1 to C-4, and/or D1 to D-2 that can specifically bind to HER3 with a dissociation constant (K_{D}) of 10⁻⁵ to 10⁻¹² moles/litre or less, and preferably 10⁻⁷ to 10⁻¹² moles/litre or less and more preferably 10⁻⁸ to 10⁻¹² moles/litre.
[0887] Aspect D-4: An immunoglobulin single variable domain according to any of aspects B-1 to B-7, C-1 to C-4, and/or D-1 to D-3 that can specifically bind to HER3 with a rate of association (kₒₙ-rate) of between 10² M⁻¹s⁻¹ to about 10⁷ M⁻¹s⁻¹, preferably between 10³ M⁻¹ s⁻¹ and 10⁷ M⁻¹s⁻¹, more preferably between 10⁴ M⁻¹s⁻¹ and 10⁷ M⁻¹s⁻¹, such as between 10⁵ M⁻¹s⁻¹ and 10⁷ M⁻¹s⁻¹.
[0888] Aspect D-5: An immunoglobulin single variable domain according to any of aspects B-1 to B-7, C-1 to C-4, and/or D-1 to D-4 that can specifically bind to HER3 with a rate of dissociation (k_{off} rate) between 1 s⁻¹ and 10⁻⁶ s⁻¹ preferably between 10⁻² s⁻¹ and 10⁻⁶ s⁻¹, more preferably between 10⁻³ s⁻¹ and 10⁻⁶ s⁻¹, such as between 10⁻⁴ s⁻¹ and 10⁻⁶ s⁻¹.
[0889] Aspect D-6: An immunoglobulin single variable domain according to any of aspects B-1 to B-7, C-1 to C-4, and/or D-1 to D-5 that can specifically bind to HER3 with an affinity less than 500 nM, preferably less than 100 nM, more preferably less than 10 nM, such as less than 1 nM.
   [0890] The immunoglobulin single variable domains according to aspects D-1 to D-6 may in particular be an immunoglobulin single variable domain according to any of the aspects A-1 to A-22.
[0891] Aspect E-1: An immunoglobulin single variable domain according to any of aspects B-1 to B-7, C-1 to C-4 and/or D1 to D-6, that is a naturally occurring immunoglobulin single variable domain (from any suitable species) or a synthetic or semi-synthetic immunoglobulin single variable domain.
[0892] Aspect E-2: An immunoglobulin single variable domain according to any of aspects B-1 to B-7, C-1 to C-4, D1 to D-6, and/or E-1 that comprises an immunoglobulin fold or that under suitable conditions is capable of forming an immunoglobulin fold.
[0893] Aspect E-3: An immunoglobulin single variable domain according to any of aspects B-1 to B-7, C-1 to C-4, D1 to D-6, and/or D-1 or D-2, that is an immunoglobulin sequence.
[0894] Aspect E-4: An immunoglobulin single variable domain according to any of aspects B-1 to B-7, C-1 to C-4, D1 to D-6, and/or E-1 to E-3, that is a naturally occurring immunoglobulin sequence (from any suitable species) or a synthetic or semi-synthetic immunoglobulin sequence.
[0895] Aspect E-5: An immunoglobulin single variable domain according to any of aspects B-1 to B-7, C-1 to C-4, D1 to D-6, and/or E-1 to E-4 that is a humanized immunoglobulin sequence, a camelized immunoglobulin sequence or an immunoglobulin sequence that has been obtained by techniques such as affinity maturation.
[0896] Aspect E-6: An immunoglobulin single variable domain according to any of aspects B-1 to B-7, C-1 to C-4, D1 to D-6, and/or E-1 to E-5 that essentially consists of a light chain variable domain sequence (e.g. a V_{L}-sequence); or of a heavy chain variable domain sequence (e.g. a V_{H}-sequence).
[0897] Aspect E-7: An immunoglobulin single variable domain according to any of aspects B-1 to B-7, C-1 to C-4, D1 to D-6, and/or E-1 to E-6, that essentially consists of a heavy chain variable domain sequence that is derived from a conventional four-chain antibody or that essentially consist of a heavy chain variable domain sequence that is derived from heavy chain antibody.
[0898] Aspect E-8: An immunoglobulin single variable domain according to any of aspects B-1 to B-7, C-1 to C-4, D1 to D-6, and/or E-1 to E-7, that essentially consists of a domain antibody (or an immunoglobulin single variable domain that is suitable for use as a domain antibody), of a single domain antibody (or an immunoglobulin single variable domain that is suitable for use as a single domain antibody), of a “dAb” (or an immunoglobulin single variable domain that is suitable for use as a dAb) or of an immunoglobulin single variable domain (including but not limited to a V_{HH} sequence).
[0899] Aspect E-9: An immunoglobulin single variable domain according to any of aspects B-1 to B-7, C-1 to C-4, D1 to D-6, and/or E-1 to E-8 that essentially consists of a VHH or engineered VHH.
[0900] Aspect E-10: An immunoglobulin single variable domain according to any of aspects B-1 to B-7, C-1 to C-4, D1 to D-6, and/or E-1 to E-9 that essentially consists of a VHH or engineered VHH that has preferably one or more of the amino acid residues at positions 11, 37, 44, 45, 47, 83, 84, 103, 104 and 108 according to the Kabat numbering are chosen from the Hallmark residues mentioned in Table B-2.
[0901] Aspect E-11: An immunoglobulin single variable domain according to any of aspects B-1 to B-7, C-1 to C-4, D1 to D-6, and/or E-1 to E-10, that essentially consists of a VHH or engineered VHH that
   [0902] i) has at least 80% amino acid identity with at least one of the immunoglobulin single variable domains of SEQ ID NO's: 12 to 26, in which for the purposes of determining the degree of amino acid identity, the amino acid residues that form the CDR sequences are disregarded;
   [0903] and in which:
   [0904] ii) preferably one or more of the amino acid residues at positions 11, 37, 44, 45, 47, 83, 84, 103, 104 and 108 according to the Kabat numbering are chosen from the Hallmark residues mentioned in Table B-2.
[0905] Aspect E-12: An immunoglobulin single variable domain according to any of aspects B-1 to B-7, C-1 to C-4, D1 to D-6, and/or E-1 to E-11 that essentially consists of a VHH or engineered VHH.
[0906] Aspect E-13: An immunoglobulin single variable domain according to any of the aspects B-1 to B-7, C-1 to C-4, D1 to D-6, and/or E-1 to E-11, that in addition to the at least one stretch of amino acid residues or binding site for binding formed by the CDR sequences, contains one or more further binding sites for binding against other antigens, proteins or targets.
   [0907] The immunoglobulin single variable domains according to aspects E-1 to E-13 may in particular be an immunoglobulin single variable domain according to any of the aspects A-1 to A-22.
[0908] Aspect F-1: An immunoglobulin single variable domain that essentially consists of 4 framework regions (FR1 to FR4, respectively) and 3 complementarity determining regions (CDR1 to CDR3, respectively), in which:

[0909] CDR1 is chosen from the group consisting of:
[0910] a) the immunoglobulin single variable domains of SEQ ID NO's: 57 to 71;
[0911] b) immunoglobulin single variable domains that have at least 80% amino acid identity with at least one of the immunoglobulin single variable domains of SEQ ID NO's: 57 to 71;
[0912] c) immunoglobulin single variable domains that have 3, 2, or 1 amino acid difference with at least one of the immunoglobulin single variable domains of SEQ ID NO's: 57 to 71;
[0913] and/or

[0914] CDR2 is chosen from the group consisting of:
[0915] d) the immunoglobulin single variable domains of SEQ ID NO's: 87 to 101;
[0916] e) immunoglobulin single variable domains that have at least 80% amino acid identity with at least one of the immunoglobulin single variable domains of SEQ ID NO's: 87 to 101;
[0917] f) immunoglobulin single variable domains that have 3, 2, or 1 amino acid difference with at least one of the immunoglobulin single variable domains of SEQ ID NO's: 87 to 101;
[0918] and/or

[0919] CDR3 is chosen from the group consisting of:
[0920] g) the immunoglobulin single variable domains of SEQ ID NO's: 117 to 131;
[0921] h) immunoglobulin single variable domains that have at least 80% amino acid identity with at least one of the immunoglobulin single variable domains of SEQ ID NO's: 117 to 131;
[0922] i) immunoglobulin single variable domains that have 3, 2, or 1 amino acid difference with at least one of the immunoglobulin single variable domains of SEQ ID NO's: 117 to 131.
[0923] Such an immunoglobulin single variable domain is preferably directed against HER3 and/or an immunoglobulin single variable domain that can specifically bind to HER3. Also, such an immunoglobulin single variable domain is preferably an immunoglobulin single variable domain according to any of the aspects A-1 to A-22, C-1 to C-4, D1 to D-6 and/or E-1 to E-13.
[0924] Aspect F-2: An immunoglobulin single variable domain that essentially consists of 4 framework regions (FR1 to FR4, respectively) and 3 complementarity determining regions (CDR1 to CDR3, respectively), in which:

[0925] CDR1 is chosen from the group consisting of:
[0926] a) the immunoglobulin single variable domains of SEQ ID NO's: 57 to 71;
[0927] b) immunoglobulin single variable domains that have at least 80% amino acid identity with at least one of the immunoglobulin single variable domains of SEQ ID NO's: 57 to 71;
[0928] c) immunoglobulin single variable domains that have 3, 2, or 1 amino acid difference with at least one of the immunoglobulin single variable domains of SEQ ID NO's: 57 to 71;
[0929] and

[0930] CDR2 is chosen from the group consisting of:
[0931] d) the immunoglobulin single variable domains of SEQ ID NO's: 87 to 101;
[0932] e) immunoglobulin single variable domains that have at least 80% amino acid identity with at least one of the immunoglobulin single variable domains of SEQ ID NO's: 87 to 101;
[0933] f) immunoglobulin single variable domains that have 3, 2, or 1 amino acid difference with at least one of the immunoglobulin single variable domains of SEQ ID NO's: 87 to 101;
[0934] and

[0935] CDR3 is chosen from the group consisting of:
[0936] g) the immunoglobulin single variable domains of SEQ ID NO's: 117 to 131;
[0937] h) immunoglobulin single variable domains that have at least 80% amino acid identity with at least one of the immunoglobulin single variable domains of SEQ ID NO's: 117 to 131;
[0938] i) immunoglobulin single variable domains that have 3, 2, or 1 amino acid difference with at least one of the immunoglobulin single variable domains of SEQ ID NO's: 117 to 131.
[0939] Such an immunoglobulin single variable domain is preferably directed against HER3 and/or an immunoglobulin single variable domain that can specifically bind to HER3. Also, such an immunoglobulin single variable domain is preferably an immunoglobulin single variable domain according to any of the aspects A-1 to A-22, C-1 to C-4, D1 to D-6 and/or E-1 to E-13.
[0940] Aspect F-3: An immunoglobulin single variable domain according to any of aspects F-1 and F-2, in which the CDR sequences of said immunoglobulin single variable domain have at least 70% amino acid identity, preferably at least 80% amino acid identity, more preferably at least 90% amino acid identity, such as 95% amino acid identity or more or even essentially 100% amino acid identity with the CDR sequences of at least one of the immunoglobulin single variable domains of SEQ ID NO's: 12 to 26.
   [0941] Such an immunoglobulin single variable domain is preferably directed against HER3 and/or an immunoglobulin single variable domain that can specifically bind to HER3. Also, such an immunoglobulin single variable domain is preferably an immunoglobulin single variable domain according to any of the aspects A-1 to A-22, C-1 to C-4, D1 to D-6 and/or E-1 to E-13.
[0942] Aspect F-4: An immunoglobulin single variable domain according to any of aspects F-1 to F-3 that is directed against HER3 and that cross-blocks the binding of at least one of the immunoglobulin single variable domains according to any of aspects the immunoglobulin single variable domains of SEQ ID NO's: 12 to 26.
[0943] Aspect F-5: An immunoglobulin single variable domain according to any of aspects F-1 to F-3 that is directed against HER3 and that is cross-blocked from binding to HER3 by at least one of the immunoglobulin single variable domains of SEQ ID NO's: 12 to 26.
[0944] Aspect F-6: Immunoglobulin single variable domain according to any of aspects F-4 or F-5 wherein the ability of said immunoglobulin single variable domain to cross-block or to be cross-blocked is detected in a FACS competition assay as e.g. shown in the experimental part.
[0945] Aspect F-7: Immunoglobulin single variable domain according to any of aspects F4 or F-5 wherein the ability of said immunoglobulin single variable domain to cross-block or to be cross-blocked is detected in an ELISA assay.
[0946] Aspect F-8: An immunoglobulin single variable domain according to any of aspects F-1 to F-7, that is in essentially isolated form.
[0947] Aspect F-9: An immunoglobulin single variable domain according to any of aspects F-1 to F-8, for administration to a subject, wherein said an immunoglobulin single variable domain does not naturally occur in said subject.
[0948] Aspect F-10: An immunoglobulin single variable domain according to any of aspects F-1 to F-9, that can specifically bind to HER3 with a dissociation constant (K_{D}) of 10⁻⁵ to 10⁻¹² moles/litre or less, and preferably 10⁻⁷ to 10⁻¹² moles/litre or less and more preferably 10⁻⁸ to 10⁻¹² moles/litre.
[0949] Aspect F-11: An immunoglobulin single variable domain according to any of aspects F-1 to F-10, that can specifically bind to HER3 with a rate of association (kₒₙ-rate) of between 10² M⁻¹s⁻¹ to about 10⁷ M⁻¹s⁻¹, preferably between 10³ M⁻¹s⁻¹ and 10⁷ M⁻¹s⁻¹, more preferably between 10⁴ M⁻¹s⁻¹ and 10⁷ M⁻¹s⁻¹, such as between 10⁵ M⁻¹s⁻¹ and 10⁷ M⁻¹s⁻¹.
[0950] Aspect F-12: An immunoglobulin single variable domain according to any of aspects F-1 to F-11, that can specifically bind to HER3 with a rate of dissociation (k_{off} rate) between 1 s⁻¹ and 10⁻⁶ s⁻¹ preferably between 10⁻² s⁻¹ and 10⁻⁶ s⁻¹, more preferably between 10⁻³ s⁻¹ and 10⁻⁶ s⁻¹, such as between 10⁻⁴ s⁻¹ and 10⁻⁶ s⁻¹.
[0951] Aspect F-13: An immunoglobulin single variable domain according to any of aspects F-1 to F-12, that can specifically bind to HER3 with an affinity less than 500 nM, preferably less than 200 nM, more preferably less than 10 nM, such as less than 1 nM.
[0952] Aspect F-14: An immunoglobulin single variable domain according to any of aspects F-1 to F-13, that is a naturally occurring immunoglobulin single variable domain (from any suitable species) or a synthetic or semi-synthetic immunoglobulin single variable domain.
[0953] Aspect F-15: An immunoglobulin single variable domain according to any of aspects F-1 to F-14, that comprises an immunoglobulin fold or that under suitable conditions is capable of forming an immunoglobulin fold.
[0954] Aspect F-16: An immunoglobulin single variable domain according to any of aspects F-1 to F-15, that is an immunoglobulin sequence.
[0955] Aspect F-17: An immunoglobulin single variable domain according to any of aspects F-1 to F-16, that is a naturally occurring immunoglobulin sequence (from any suitable species) or a synthetic or semi-synthetic immunoglobulin sequence.
[0956] Aspect F-18: An immunoglobulin single variable domain according to any of aspects F-1 to F-17, that is a humanized immunoglobulin sequence, a camelized immunoglobulin sequence or an immunoglobulin sequence that has been obtained by techniques such as affinity maturation.
[0957] Aspect F-19: An immunoglobulin single variable domain according to any of aspects F-1 to F-19, that essentially consists of a light chain variable domain sequence (e.g. a V_{L}-sequence); or of a heavy chain variable domain sequence (e.g. a V_{H}-sequence).
[0958] Aspect F-20: An immunoglobulin single variable domain according to any of aspects F-1 to F-19, that essentially consists of a heavy chain variable domain sequence that is derived from a conventional four-chain antibody or that essentially consist of a heavy chain variable domain sequence that is derived from heavy chain antibody.
[0959] Aspect F-21: An immunoglobulin single variable domain according to any of aspects F-1 to F-20, that essentially consists of a domain antibody (or an immunoglobulin single variable domain that is suitable for use as a domain antibody), of a single domain antibody (or an immunoglobulin single variable domain that is suitable for use as a single domain antibody), of a “dAb” (or an immunoglobulin single variable domain that is suitable for use as a dAb) or of a VHH or engineered VHH.
[0960] Aspect F-22: An immunoglobulin single variable domain according to any of aspects F-1 to F-21, that essentially consists of a VHH or engineered VHH.
[0961] Aspect F-23: An immunoglobulin single variable domain according to any of aspects F-1 to F-22, that essentially consists of a VHH or engineered VHH that has preferably one or more of the amino acid residues at positions 11, 37, 44, 45, 47, 83, 84, 103, 104 and 108 according to the Kabat numbering are chosen from the Hallmark residues mentioned in Table B-2.
[0962] Aspect F-24: An immunoglobulin single variable domain according to any of aspects F-1 to F-23, that essentially consists of an immunoglobulin single variable domain that
   [0963] i) has at least 80% amino acid identity with at least one of the immunoglobulin single variable domains of SEQ ID NO's: 12 to 26, in which for the purposes of determining the degree of amino acid identity, the amino acid residues that form the CDR sequences are disregarded;
   [0964] and in which:
   [0965] ii) preferably one or more of the amino acid residues at positions 11, 37, 44, 45, 47, 83, 84, 103, 104 and 108 according to the Kabat numbering are chosen from the Hallmark residues mentioned in Table B-2.
[0966] Aspect F-25: An immunoglobulin single variable domain according to any of aspects F-1 to F-24, that essentially consists of a sequence optimized VHH.
[0967] Aspect G-1: An immunoglobulin single variable domain according to any of the preceding aspects, that in addition to the at least one binding site for binding formed by the CDR sequences, contains one or more further binding sites for binding against another antigen, protein or target.
[0968] Aspect H-1: VHH that is directed against and/or that can specifically bind to HER3.
[0969] Aspect H-2: VHH according to aspect H-1, that is in essentially isolated form.
[0970] Aspect H-3: VHH according to any of aspects H-1 to H-2, that can specifically bind to HER3 with a dissociation constant (K_{D}) of 10⁻⁵ to 10⁻¹² moles/litre or less, and preferably 10⁻⁷ to 10⁻¹² moles/litre or less and more preferably 10⁻⁸ to 10⁻¹² moles/litre.
[0971] Aspect H-4: VHH according to any of aspects H-1 to H-3, that can specifically bind to HER3 with a rate of association (kₒₙ-rate) of between 10² M⁻¹s⁻¹ to about 10⁷ M⁻¹s⁻¹, preferably between 10³ M⁻¹s⁻¹ and 10⁷ M⁻¹s⁻¹, more preferably between 10⁴ M⁻¹s⁻¹ and 10⁷ M⁻¹s⁻¹, such as between 10⁵ M⁻¹s⁻¹ and 10⁷ M⁻¹s⁻¹.
[0972] Aspect H-5: VHH according to any of aspects H-1 to H-4, that can specifically bind to HER3 with a rate of dissociation (k_{off} rate) between 1 s⁻¹ and 10⁻⁶ s⁻¹ preferably between 10⁻² s⁻¹ and 10⁻⁶ s⁻¹, more preferably between 10⁻³ s⁻¹ and 10⁻⁶ s⁻¹, such as between 10⁻⁴ s⁻¹ and 10⁻⁶ s⁻¹.
[0973] Aspect H-6: VHH according to any of aspects H-1 to H-5, that can specifically bind to HER3 with an affinity less than 500 nM, preferably less than 200 nM, more preferably less than 10 nM, such as less than 500 pM.
[0974] Aspect H-7: VHH according to any of aspects H-1 to H-6, that is a naturally occurring VHH (from e.g. a llama) or a synthetic or semi-synthetic VHH.
[0975] Aspect H-8: VHH according to any of aspects to H-1 to H-7, that is a V_{HH} sequence, a partially humanized V_{HH} sequence, a fully humanized V_{HH} sequence, a camelized heavy chain variable domain or a VHH that has been obtained by techniques such as affinity maturation.
[0976] Aspect H-9: VHH according to any of aspects H-1 to H-8, that has preferably one or more of the amino acid residues at positions 11, 37, 44, 45, 47, 83, 84, 103, 104 and 108 according to the Kabat numbering are chosen from the Hallmark residues mentioned in Table B-2.
[0977] Aspect H-10: VHH according to any of aspects H-1 to H-9, that
   [0978] i) has at least 80% amino acid identity with at least one of the An immunoglobulin single variable domains of SEQ ID NO's: 12 to 26, in which for the purposes of determining the degree of amino acid identity, the amino acid residues that form the CDR sequences are disregarded;
   [0979] and in which:
   [0980] ii) preferably one or more of the amino acid residues at positions 11, 37, 44, 45, 47, 83, 84, 103, 104 and 108 according to the Kabat numbering are chosen from the Hallmark residues mentioned in Table B-2.
[0981] Aspect H-11: VHH according to any of aspects H-1 to H-10, in which:

[0982] CDR1 is chosen from the group consisting of:
[0983] a) the immunoglobulin single variable domains of SEQ ID NO's: 57 to 71;
[0984] b) immunoglobulin single variable domains that have at least 80% amino acid identity with at least one of the immunoglobulin single variable domains of SEQ ID NO's: 57 to 71;
[0985] c) immunoglobulin single variable domains that have 3, 2, or 1 amino acid difference with at least one of the immunoglobulin single variable domains of SEQ ID NO's: 57 to 71;
[0986] and/or

[0987] CDR2 is chosen from the group consisting of:
[0988] d) the immunoglobulin single variable domains of SEQ ID NO's: 87 to 101;
[0989] e) immunoglobulin single variable domains that have at least 80% amino acid identity with at least one of the immunoglobulin single variable domains of SEQ ID NO's: 87 to 101;
[0990] f) immunoglobulin single variable domains that have 3, 2, or 1 amino acid difference with at least one of the immunoglobulin single variable domains of SEQ ID NO's: 87 to 101;
[0991] and/or

[0992] CDR3 is chosen from the group consisting of:
[0993] g) the immunoglobulin single variable domains of SEQ ID NO's: 117 to 131;
[0994] h) immunoglobulin single variable domains that have at least 80% amino acid identity with at least one of the immunoglobulin single variable domains of SEQ ID NO's: 117 to 131;
[0995] i) immunoglobulin single variable domains that have 3, 2, or 1 amino acid difference with at least one of the immunoglobulin single variable domains of SEQ ID NO's: 117 to 131.
[0996] Aspect H-12: VHH according to any of aspects H-1 to H-11, in which:

[0997] CDR1 is chosen from the group consisting of:
[0998] a) the immunoglobulin single variable domains of SEQ ID NO's: 57 to 71;
[0999] b) immunoglobulin single variable domains that have at least 80% amino acid identity with at least one of the immunoglobulin single variable domains of SEQ ID NO's: 57 to 71;
[1000] c) immunoglobulin single variable domains that have 3, 2, or 1 amino acid difference with at least one of the immunoglobulin single variable domains of SEQ ID NO's: 57 to 71;
[1001] and

[1002] CDR2 is chosen from the group consisting of:
[1003] d) the immunoglobulin single variable domains of SEQ ID NO's: 87 to 101;
[1004] e) immunoglobulin single variable domains that have at least 80% amino acid identity with at least one of the immunoglobulin single variable domains of SEQ ID NO's: 87 to 101;
[1005] f) immunoglobulin single variable domains that have 3, 2, or 1 amino acid difference with at least one of the immunoglobulin single variable domains of SEQ ID NO's: 87 to 101;
[1006] and

[1007] CDR3 is chosen from the group consisting of:
[1008] g) the immunoglobulin single variable domains of SEQ ID NO's: 117 to 131;
[1009] h) immunoglobulin single variable domains that have at least 80% amino acid identity with at least one of the immunoglobulin single variable domains of SEQ ID NO's: 117 to 131;
[1010] i) immunoglobulin single variable domains that have 3, 2, or 1 amino acid difference with at least one of the immunoglobulin single variable domains of SEQ ID NO's: 117 to 131.
[1011] Aspect H-13: VHH according to any of aspects H-1 to H-12, in which the CDR sequences have at least 70% amino acid identity, preferably at least 80% amino acid identity, more preferably at least 90% amino acid identity, such as 95% amino acid identity or more or even essentially 100% amino acid identity with the CDR sequences of at least one of the immunoglobulin single variable domains of SEQ ID NO's: 12 to 26.
[1012] Aspect H-14: VHH according to any of aspects H-1 to H-13, which is a partially humanized VHH.
[1013] Aspect H-15: VHH according to any of aspects H-1 to H-14, which is a fully humanized VHH.
[1014] Aspect H-16: VHH according to any of aspects H-1 to H-15, that is chosen from the group consisting of SEQ ID NO's: 12 to 26 or from the group consisting of from immunoglobulin single variable domains that have more than 80%, preferably more than 90%, more preferably more than 95%, such as 99% or more sequence identity (as defined herein) with at least one of the immunoglobulin single variable domains of SEQ ID NO's: 12 to 26.
[1015] Aspect H-17: VHH according to any of aspects H-1 to H-16, which is a humanized VHH.
[1016] Aspect H-18: VHH according to any of aspects H-1 to H-17, that is chosen from the group consisting of SEQ ID NO's: 12 to 26.
[1017] Aspect H-19: VHH directed against HER3 that cross-blocks the binding of at least one of the immunoglobulin single variable domains of SEQ ID NO's: 12 to 26 to HER3.
[1018] Aspect H-20: VHH directed against HER3 that is cross-blocked from binding to HER3 by at least one of the immunoglobulin single variable domains of SEQ ID NO's: 12 to 26.
[1019] Aspect H-21: VHH according to any of aspects H-19 or H-20 wherein the ability of said VHH to cross-block or to be cross-blocked is detected in a FACS competition assay, e.g. as described in the experimental part.
[1020] Aspect H-22: VHH according to any of aspects H-19 to H-21 wherein the ability of said VHH to cross-block or to be cross-blocked is detected in an ELISA assay.
[1021] Aspect K-1: Polypeptide that comprises or essentially consists of one or more immunoglobulin single variable domains according to any of aspects A-1 to A-22, B-1 to B-7, C-1 to C-4, D-1 to D-6, E-1 to E-13, F-1 to F-25, G-1 and/or one or more VHH according to any of aspects H-1 to H-22, and optionally further comprises one or more peptidic linkers and/or one or more other groups, residues, moieties or binding units.
[1022] Aspect K-2: Polypeptide according to aspect K-1, in which said one or more binding units are immunoglobulin sequences, and in particular ISV's.
[1023] Aspect K-3: Polypeptide according to any of aspects K-1 or K-2, in which said one or more other groups, residues, moieties or binding units are chosen from the group consisting of domain antibodies, immunoglobulin single variable domains that are suitable for use as a domain antibody, single domain antibodies, immunoglobulin single variable domains that are suitable for use as a single domain antibody, “dAb”'s, immunoglobulin single variable domains that are suitable for use as a dAb, or VHHs.
[1024] Aspect K-4: Polypeptide according to any of aspects K-1 to K-3, in which said one or more immunoglobulin single variable domains of the invention are immunoglobulin sequences.
[1025] Aspect K-5: Polypeptide according to any of aspects K-1 to K-4, in which said one or more immunoglobulin single variable domains of the invention are chosen from the group consisting of domain antibodies, immunoglobulin single variable domains that are suitable for use as a domain antibody, single domain antibodies, immunoglobulin single variable domains that are suitable for use as a single domain antibody, “dAb”'s, immunoglobulin single variable domains that are suitable for use as a dAb, or VHHs.
[1026] Aspect K-6: Polypeptide according to any of aspects K-1 to K-5, that comprises or essentially consists of one or more Nanobodies according to any of aspects H-1 to H-22 and in which said one or more other binding units are Nanobodies.
[1027] Aspect K-7: Polypeptide according to any of aspects K-1 to K-6, wherein at least one binding unit is a multivalent construct.
[1028] Aspect K-8: Polypeptide according to any of aspects K-1 to K-7, wherein at least one binding unit is a multiparatopic construct.
[1029] Aspect K-9: Polypeptide according to any of aspects K-1 to K-8, wherein at least one binding unit is a multispecific construct.
[1030] Aspect K-10: Polypeptide according to any of aspects K-1 to K-9, which has an increased half-life, compared to the corresponding immunoglobulin single variable domain according to any of aspects A-1 to A-22, B-1 to B-7, C-1 to C-4, D-1 to D-6, E-1 to E-13, F-1 to F-25 or G-1 per se or VHH according to any of aspects H-1 to H-22 per se, respectively.
[1031] Aspect K-11: Polypeptide according to aspect K-10, in which said one or more other binding units provide the polypeptide with increased half-life, compared to the corresponding immunoglobulin single variable domain according to any of aspects A-1 to A-22, B-1 to B-7, C-1 to C-4, D-1 to D-6, E-1 to E-13, F-1 to F-25 or G-1 per se or VHH according to any of aspects H-1 to H-22 per se, respectively.
[1032] Aspect K-12: Polypeptide according to aspect K-10 or K-11, in which said one or more other binding units that provide the polypeptide with increased half-life is chosen from the group consisting of serum proteins or fragments thereof, binding units that can bind to serum proteins, an Fc portion, and small proteins or peptides that can bind to serum proteins.
[1033] Aspect K-13: Polypeptide according to any of aspects K-10 to K-12, in which said one or more other binding units that provide the polypeptide with increased half-life is chosen from the group consisting of human serum albumin or fragments thereof.
[1034] Aspect K-14: Polypeptide according to any of aspect K-10 to K-13, in which said one or more other binding units that provides the polypeptide with increased half-life are chosen from the group consisting of binding units that can bind to serum albumin (such as human serum albumin) or a serum immunoglobulin (such as IgG).
[1035] Aspect K-15: Polypeptide according to any of aspects K-10 to K-14, in which said one or more other binding units that provides the polypeptide with increased half-life are chosen from the group consisting of domain antibodies, immunoglobulin single variable domains that are suitable for use as a domain antibody, single domain antibodies, immunoglobulin single variable domains that are suitable for use as a single domain antibody, “dAb”'s, immunoglobulin single variable domains that are suitable for use as a dAb, or VHHs that can bind to serum albumin (such as human serum albumin) or a serum immunoglobulin (such as IgG).
[1036] Aspect K-16: Polypeptide according to aspect K-10 to K-15, in which said one or more other binding units that provides the polypeptide with increased half-life is a VHH that can bind to serum albumin (such as human serum albumin) or a serum immunoglobulin (such as IgG).
[1037] Aspect K-17: Polypeptide according to any of aspects K-10 to K-16, that has a serum half-life that is at least 1.5 times, preferably at least 2 times, such as at least 5 times, for example at least 10 times or more than 20 times, greater than the half-life of the corresponding immunoglobulin single variable domain according to any of aspects A-1 to A-22, B-1 to B-7, C-1 to C-4, D-1 to D-6, E-1 to E-13, F-1 to F-25 or G-1 per se or a VHH according to any of aspects H-1 to H-22 per se, respectively.
[1038] Aspect K-18: Polypeptide according to any of aspects K-10 to K-17, that has a serum half-life that is increased with more than 1 hours, preferably more than 2 hours, more preferably more than 6 hours, such as more than 12 hours, or even more than 24, 48 or 72 hours, compared to the corresponding immunoglobulin single variable domain according to any of aspects A-1 to A-22, B-1 to B-7, C-1 to C-4, D-1 to D-6, E-1 to E-13, F-1 to F-25 or G-1 per se or a VHH according to any of aspects H-1 to H-22 per se, respectively.
[1039] Aspect K-19: Polypeptide according to any of aspects K-1 to K-18, that has a serum half-life in human of at least about 12 hours, preferably at least 24 hours, more preferably at least 48 hours, even more preferably at least 72 hours or more; for example, of at least 5 days (such as about 5 to 10 days), preferably at least 9 days (such as about 9 to 14 days), more preferably at least about 10 days (such as about 10 to 15 days), or at least about 11 days (such as about 11 to 16 days), more preferably at least about 12 days (such as about 12 to 18 days or more), or more than 14 days (such as about 14 to 19 days).
[1040] Aspect L-1: Compound or construct, that comprises or essentially consists of one or more immunoglobulin single variable domains according to any of aspects A-1 to A-22, B-1 to B-7, C-1 to C-4, D-1 to D-6, E-1 to E-13, F-1 to F-25 or G-1 and/or one or more VHHs according to any of aspects H-1 to H-22, and optionally further comprises one or more other groups, residues, moieties or binding units, optionally linked via one or more linkers.
[1041] Aspect L-2: Compound or construct according to aspects L-1, in which said one or more other groups, residues, moieties or binding units are immunoglobulin single variable domains.
[1042] Aspect L-3: Compound or construct according to aspect L-1 or L-2, in which said one or more linkers, if present, are one or more immunoglobulin single variable domains.
[1043] Aspect L-4: Compound or construct according to any of aspects L-1 to L-3, in which said one or more other groups, residues, moieties or binding units are immunoglobulin sequences.
[1044] Aspect L-5: Compound or construct according to any of aspects L-1 to L-4, in which said one or more other groups, residues, moieties or binding units are chosen from the group consisting of domain antibodies, immunoglobulin single variable domains that are suitable for use as a domain antibody, single domain antibodies, immunoglobulin single variable domains that are suitable for use as a single domain antibody, “dAb”'s, immunoglobulin single variable domains that are suitable for use as a dAb, or VHHs.
[1045] Aspect L-6: Compound or construct according to any of aspects L-1 to L-5, in which said one or more immunoglobulin single variable domains of the invention are immunoglobulin sequences.
[1046] Aspect L-7: Compound or construct according to any of aspects L-1 to L-6, in which said one or more immunoglobulin single variable domains of the invention are chosen from the group consisting of domain antibodies, immunoglobulin single variable domains that are suitable for use as a domain antibody, single domain antibodies, immunoglobulin single variable domains that are suitable for use as a single domain antibody, “dAb”'s, immunoglobulin single variable domains that are suitable for use as a dAb, or VHHs.
[1047] Aspect L-8: Compound or construct, that comprises or essentially consists of one or more VHH's or Nanobodies according to any of aspects H-1 to H-22 and in which said one or more other groups, residues, moieties or binding units are VHHs.
[1048] Aspect L-9: Compound or construct according to any of aspects L-1 to L-8, which is a multivalent construct.
[1049] Aspect L-10: Compound or construct according to any of aspects L-1 to L-9, which is a multispecific construct.
[1050] Aspect L-11: Compound or construct according to any of aspects L-1 to L-10, which has an increased half-life, compared to the corresponding immunoglobulin single variable domain according to any of aspects A-1 to A-22, B-1 to B-7, C-1 to C-4, D-1 to D-6, E-1 to E-13, F-1 to F-25 or G-1 per se or VHH according to any of aspects H-1 to H-22 per se, respectively.
[1051] Aspect L-12: Compound or construct according to aspect L-1 to L-11, in which said one or more other groups, residues, moieties or binding units provide the compound or construct with increased half-life, compared to the corresponding immunoglobulin single variable domain according to any of aspects A-1 to A-22, B-1 to B-7, C-1 to C-4, D-1 to D-6, E-1 to E-13, F-1 to F-25 or G-1 per se or VHH according to any of aspects H-1 to H-22 per se, respectively.
[1052] Aspect L-13: Compound or construct according to aspect L-12, in which said one or more other groups, residues, moieties or binding units that provide the compound or construct with increased half-life is chosen from the group consisting of serum proteins or fragments thereof, binding units that can bind to serum proteins, an Fc portion, and small proteins or peptides that can bind to serum proteins.
[1053] Aspect L-14: Compound or construct according to aspect L-12 or L-13, in which said one or more other groups, residues, moieties or binding units that provide the compound or construct with increased half-life is chosen from the group consisting of human serum albumin or fragments thereof.
[1054] Aspect L-15: Compound or construct according to any of aspects L-12 to L-14, in which said one or more other groups, residues, moieties or binding units that provides the compound or construct with increased half-life are chosen from the group consisting of binding units that can bind to serum albumin (such as human serum albumin) or a serum immunoglobulin (such as IgG).
[1055] Aspect L-16: Compound or construct according to any of aspects L-12 to L-14, in which said one or more other groups, residues, moieties or binding units that provides the compound or construct with increased half-life are chosen from the group consisting of domain antibodies, immunoglobulin single variable domains that are suitable for use as a domain antibody, single domain antibodies, immunoglobulin single variable domains that are suitable for use as a single domain antibody, “dAb”'s, immunoglobulin single variable domains that are suitable for use as a dAb, or VHHs that can bind to serum albumin (such as human serum albumin) or a serum immunoglobulin (such as IgG).
[1056] Aspect L-17: Compound or construct according to any of aspects L-12 to L-14, in which said one or more other groups, residues, moieties or binding units that provides the compound or construct with increased half-life is a VHH that can bind to serum albumin (such as human serum albumin) or a serum immunoglobulin (such as IgG).
[1057] Aspect L-18: Compound or construct according to any of aspects L-12 to L-17, that has a serum half-life that is at least 1.5 times, preferably at least 2 times, such as at least 5 times, for example at least 10 times or more than 20 times, greater than the half-life of the corresponding immunoglobulin single variable domain according to any of aspects A-1 to A-22, B-1 to B-7, C-1 to C-4, D-1 to D-6, E-1 to E-13, F-1 to F-25 or G-1 per se or VHH according to any of aspects H-1 to H-22 per se, respectively.
[1058] Aspect L-19: Compound or construct according to any of aspects L-12 to L-18, that has a serum half-life that is increased with more than 1 hours, preferably more than 2 hours, more preferably more than 6 hours, such as more than 12 hours, or even more than 24, 48 or 72 hours, compared to the corresponding immunoglobulin single variable domain according to any of aspects A-1 to A-22, B-1 to B-7, C-1 to C-4, D-1 to D-6, E-1 to E-13, F-1 to F-25 or G-1 per se or VHH according to any of aspects H-1 to H-22 per se, respectively.
[1059] Aspect L-20: Compound or construct according to any of aspects L-12 to L-19, that has a serum half-life in human of at least about 12 hours, preferably at least 24 hours, more preferably at least 48 hours, even more preferably at least 72 hours or more; for example, of at least 5 days (such as about 5 to 10 days), preferably at least 9 days (such as about 9 to 14 days), more preferably at least about 10 days (such as about 10 to 15 days), or at least about 11 days (such as about 11 to 16 days), more preferably at least about 12 days (such as about 12 to 18 days or more), or more than 14 days (such as about 14 to 19 days).
[1060] Aspect L-21: Monovalent construct, comprising or essentially consisting of one immunoglobulin single variable domain according to any of aspects A-1 to A-22, B-1 to B-7, C-1 to C-4, D-1 to D-6, E-1 to E-13, F-1 to F-25 or G-1 and/or one VHH according to any of aspects H-1 to H-22.
[1061] Aspect L-22: Monovalent construct according to aspect L-21, in which said immunoglobulin single variable domain of the invention is chosen from the group consisting of domain antibodies, immunoglobulin single variable domains that are suitable for use as a domain antibody, single domain antibodies, immunoglobulin single variable domains that are suitable for use as a single domain antibody, “dAb”'s, immunoglobulin single variable domains that are suitable for use as a dAb, or VHHs.
[1062] Aspect L-23: Monovalent construct, comprising or essentially consisting of one VHH according to any of aspects H-1 to H-22.
[1063] Aspect M-1: Nucleic acid or nucleotide sequence, that encodes an immunoglobulin single variable domain according to any of aspects A-1 to A-22, B-1 to B-7, C-1 to C-4, D-1 to D-6, E-1 to E-13, F-1 to F-25 or G-1, a VHH according to any of aspects H-1 to H-22, a compound or construct according to any of aspects that is such that it can be obtained by expression of a nucleic acid or nucleotide sequence encoding the same; e.g. a nucleic acid or nucleotide sequence that has at least 70% sequence identity, preferably at least 80% sequence identity, more preferably at least 90% sequence identity, such as 95% sequence identity or more or even essentially 100% sequence identity with the sequences of at least one of the nucleic acid or nucleotide sequence of SEQ ID NO's: 27 to 41.
[1064] Aspect M-2: Nucleic acid or nucleotide sequence according to aspect M-1, that is in the form of a genetic construct.
[1065] Aspect N-1: Host or host cell that expresses, or that under suitable circumstances is capable of expressing, an immunoglobulin single variable domain according to any of aspects A-1 to A-22, B-1 to B-7, C-1 to C-4, D-1 to D-6, E-1 to E-13, F-1 to F-25 or G-1, a VHH according to any of aspects H-1 to H-22, a polypeptide according to any of aspects K-1 to K-19, a compound or construct according to any of aspects L-1 to L-21 that is such that it can be obtained by expression of a nucleic acid or nucleotide sequence encoding the same, or a monovalent construct according to any of aspects L-22 or L-23; and/or that comprises a nucleic acid or nucleotide sequence according to aspect M-1 or a genetic construct according to aspect M-2.
[1066] Aspect O-1: Composition comprising at least one immunoglobulin single variable domain according to any of aspects A-1 to A-22, B-1 to B-7, C-1 to C-4, D-1 to D-6, E-1 to E-13, F-1 to F-25 or G-1, a VHH according to any of aspects H-1 to H-22, a polypeptide according to any of aspects K-1 to K-19, a compound or construct according to any of aspects L-1 to L-21, monovalent construct according to any of aspects L-22 or L-23, or a nucleic acid or nucleotide sequence according to aspects M-1 or M-2.
[1067] Aspect O-2: Composition according to aspect O-1, which is a pharmaceutical composition.
[1068] Aspect O-3: Composition according to aspect O-2, which is a pharmaceutical composition, that further comprises at least one pharmaceutically acceptable carrier, diluent or excipient and/or adjuvant, and that optionally comprises one or more further pharmaceutically active polypeptides and/or compounds.
[1069] Aspect P-1: Method for producing an immunoglobulin single variable domain according to any of aspects A-1 to A-22, B-1 to B-7, C-1 to C-4, D-1 to D-6, E-1 to E-13, F-1 to F-25 or G-1, a VHH according to any of aspects H-1 to H-22, a polypeptide according to any of aspects K-1 to K-19, a compound or construct according to any of aspects L-1 to L-21 that is such that it can be obtained by expression of a nucleic acid or nucleotide sequence encoding the same, or a monovalent construct according to any of aspects L-22 or L-23, said method at least comprising the steps of:
   [1070] a) expressing, in a suitable host cell or host organism or in another suitable expression system, a nucleic acid or nucleotide sequence according to aspect M-1, or a genetic construct according to aspect M-2;
   [1071] optionally followed by:
   [1072] b) isolating and/or purifying the immunoglobulin single variable domain according to any of aspects A-1 to A-22, B-1 to B-7, C-1 to C-4, D-1 to D-6, E-1 to E-13, F-1 to F-25 or G-1, a VHH according to any of aspects H-1 to H-22, a polypeptide according to any of aspects K-1 to K-19, a compound or construct according to any of aspects L-1 to L-21, or a monovalent construct according to any of aspects L-22 or L-23 thus obtained.
[1073] Aspect P-2: Method for producing an immunoglobulin single variable domain according to any of aspects A-1 to A-22, B-1 to B-7, C-1 to C-4, D-1 to D-6, E-1 to E-13, F-1 to F-25 or G-1, a VHH according to any of aspects H-1 to H-22, a polypeptide according to any of aspects K-1 to K-19, a compound or construct according to any of aspects L-1 to L-21 that is such that it can be obtained by expression of a nucleic acid or nucleotide sequence encoding the same, or a monovalent construct according to any of aspects L-22 or L-23, said method at least comprising the steps of:
   [1074] a) cultivating and/or maintaining a host or host cell according to aspect N1, under conditions that are such that said host or host cell expresses and/or produces at least one immunoglobulin single variable domain according to any of aspects A-1 to A-22, B-1 to B-7, C-1 to C-4, D-1 to D-6, E-1 to E-13, F-1 to F-25 or G-1, a VHH according to any of aspects H-1 to H-22, a polypeptide according to any of aspects K-1 to K-19, a compound or construct according to any of aspects L-1 to L-21, or monovalent construct according to any of aspects L-22 or L-23;
   [1075] optionally followed by:
   [1076] b) isolating and/or purifying the immunoglobulin single variable domain according to any of aspects A-1 to A-22, B-1 to B-7, C-1 to C-4, D-1 to D-6, E-1 to E-13, F-1 to F-25 or G-1, VHH according to any of aspects H-1 to H-22, a polypeptide according to any of aspects K-1 to K-19, a compound or construct according to any of aspects L-1 to L-21, or monovalent construct according to any of aspects L-22 or L-23 thus obtained.
[1077] Aspect Q-1: Method for screening immunoglobulin single variable domains directed against HER3 that comprises at least the steps of:
   [1078] a) providing a set, collection or library of nucleic acid sequences encoding immunoglobulin single variable domains;
   [1079] b) screening said set, collection or library of nucleic acid sequences for nucleic acid sequences that encode an immunoglobulin single variable domain that can bind to and/or has affinity for HER3 and that is cross-blocked or is cross blocking a Immunoglobulin single variable domain of the invention, e.g. SEQ ID NO: 12 to 26 (Table-A-1), or a humanized Immunoglobulin single variable domain of the invention, or a polypeptide or construct of the invention, e.g. SEQ ID NO: 147 to 327, more preferably HER3MS00135 (SEQ ID NO:282), HER3MS00212 (SEQ ID NO:319) or HER3MS00215 (SEQ ID NO:322). (see Table A-2); and
   [1080] c) isolating said nucleic acid sequence, followed by expressing said immunoglobulin single variable domain.
[1081] Aspect R-1: Method for the prevention and/or treatment of at least one variety of cancers, said method comprising administering, to a subject in need thereof, a pharmaceutically active amount of at least one immunoglobulin single variable domain according to any of aspects A-1 to A-22, B-1 to B-7, C-1 to C-4, D-1 to D-6, E-1 to E-13, F-1 to F-25 or G-1, VHH according to any of aspects H-1 to H-22, polypeptide according to any of aspects K-1 to K-19, compound or construct according to any of aspects L-1 to L-21, monovalent construct according to any of aspects L-22 or L-23; or composition according to aspect O-2 or O-3.
[1082] Aspect R-2: Method for the prevention and/or treatment of at least one disease or disorder that is associated with HER3, with its biological or pharmacological activity, and/or with the biological pathways or signalling in which HER3 is involved, said method comprising administering, to a subject in need thereof, a pharmaceutically active amount of at least one immunoglobulin single variable domain according to any of aspects A-1 to A-22, B-1 to B-7, C-1 to C-4, D-1 to D-6, E-1 to E-13, F-1 to F-25 or G-1, VHH according to any of aspects H-1 to H-22, polypeptide according to any of aspects K-1 to K-19, compound or construct according to any of aspects L-1 to L-21, monovalent construct according to any of aspects L-22 or L-23; or composition according to aspect O-2 or O-3.
[1083] Aspect R-3: Method for the prevention and/or treatment of at least one disease or disorder that can be prevented and/or treated by administering, to a subject in need thereof, at least one immunoglobulin single variable domain according to any of aspects A-1 to A-22, B-1 to B-7, C-1 to C-4, D-1 to D-6, E-1 to E-13, F-1 to F-25 or G-1, VHH according to any of aspects H-1 to H-22, polypeptide according to any of aspects K-1 to K-19, compound or construct according to any of aspects L-1 to L-21, monovalent construct according to any of aspects L-22 or L-23; or composition according to aspect O-2 or O-3, said method comprising administering, to a subject in need thereof, a pharmaceutically active amount of at least one at least one immunoglobulin single variable domain according to any of aspects A-1 to A-22, B-1 to B-7, C-1 to C-4, D-1 to D-6, E-1 to E-13, F-1 to F-25 or G-1, VHH according to any of aspects H-1 to H-22, polypeptide according to any of aspects K-1 to K-19, compound or construct according to any of aspects L-1 to L-21, monovalent construct according to any of aspects L-22 or L-23; or composition according to aspect O-2 or O-3.
[1084] Aspect R-4: Method for immunotherapy, said method comprising administering, to a subject in need thereof, a pharmaceutically active amount of at least one immunoglobulin single variable domain according to any of aspects A-1 to A-22, B-1 to B-7, C-1 to C-4, D-1 to D-6, E-1 to E-13, F-1 to F-25 or G-1, VHH according to any of aspects H-1 to H-22, polypeptide according to any of aspects K-1 to K-19, compound or construct according to any of aspects L-1 to L-21, monovalent construct according to any of aspects L-22 or L-23; or composition according to aspect O-2 or O-3.
[1085] Aspect R-5: Use of an immunoglobulin single variable domain according to any of aspects A-1 to A-22, B-1 to B-7, C-1 to C-4, D-1 to D-6, E-1 to E-13, F-1 to F-25 or G-1, a VHH according to any of aspects H-1 to H-22, a polypeptide according to any of aspects K-1 to K-19, a compound or construct according to any of aspects L-1 to L-21, or a monovalent construct according to any of aspects L-22 or L-23 in the preparation of a pharmaceutical composition for prevention and/or treatment of at least one variety of cancers; and/or for use in one or more of the methods according to aspects R-1 to R-3.
[1086] Aspect R-6: Immunoglobulin single variable domain according to any of aspects A-1 to A-22, B-1 to B-7, C-1 to C-4, D-1 to D-6, E-1 to E-13, F-1 to F-25 or G-1, VHH according to any of aspects H-1 to H-22, polypeptide according to any of aspects K-1 to K-19, compound or construct according to any of aspects L-1 to L-21, monovalent construct according to any of aspects L-22 or L-23; or composition according to aspect O-2 or O-3 for the prevention and/or treatment of at least one variety of cancers.

### FIGURES

[1087] FIG. 1: nucleotide sequences encoding some of the amino acid sequences and polypeptides of the invention.

[1088] FIG. 2: FACS binding data of HER3-specific Nanobodies and control polyclonal (PC) and monoclonal (MC) antibodies and an irrelevant Nanobody (irr nb) to full length extracellular chicken HER3 or chimeric chicken-human HER3.

[1089] FIGS. 3A to 3D show binding curves showing that the multivalent sequence optimized Nanobodies bind to HER3 but not to the other HER proteins (see Example 25).

[1090] FIG. 4 gives the amino acid sequences of some of the proteins referred to in the present specification and claims.

[1091] FIGS. 5A and 5B show Western Blots showing the inhibition of pHER3 and downstream signalling in BT-474 breast cancer cells by formatted sequence optimized Nanobodies (Example 28).

[1092] FIGS. 6A to 6C show Western Blots showing the inhibition of pHER3 and downstream signalling in BxPC3 pancreatic cancer cells by formatted sequence optimized Nanobodies (Example 28).

[1093] FIGS. 7A to 7C show the inhibition of tumor growth (median tumor volume over time) of A549 xenograft tumors treated with Nanobodies HER3MS00135 (FIG. 7A), HER3MS00212 (FIG. 7B), and HER3MS00215 (FIG. 7C), respectively.

### EXPERIMENTAL PART

### Example 1

### Materials

[1094] 1.1 hHER3 ECD (=Human HER3 Extracellular Domain)—SEQ ID NO: 4.

[1095] The gene encoding the human HER3 extracellular domain was generated by in-vitro synthesis. The open reading frame contained the coding sequence of the cognate signal peptide of the HER3 gene followed by 624 amino acids of the extracellular domain (ECD), and a C-terminal 6H is tag (see SEQ ID NO: 4). The gene was cloned into the pEAK12d expression vector (Edge Biosystems). HER3ECD was produced by transient transfection of HEK293-EBNA cells (Invitrogen). Briefly, cells adapted for suspension growth in DMEM:F12 medium containing 4 ml/L Insulin-Transferrin-Selenium-X supplement and 1% Foetal Bovine Serum (all from Invitrogen) were incubated with a mixture of plasmid DNA and Poly-Ethylenelmine (PEI, PolySciences). After 90 min, transfected cells were diluted 1:1 in Freestyle medium (Invitrogen) and placed on an orbital shaker at 37° C. in a 5% CO2 incubator under agitation at 160 rpm. The supernatant was harvested after 6 days and sterile filtered through a 0.22 μm membrane cartridge (Millipore). The recombinant protein was purified on a Poros 20 MC metal chelate affinity chromatography column (Applied Biosystems) charged with Ni ions, followed by size exclusion chromatography in PBS on a HiLoad Superdex 75 prepgrade 16/60 column from GE Healthcare.

1.2 cHER3ECD (=Maccaca fascicularis HER3 Extracellular Domain=Cyno HER3ECD)—SEQ ID NO: 3

[1096] The cyno HER3 sequence was determined by RT-PCR and cDNA sequencing. The open reading frame contained the coding sequence of the cognate signal peptide of the cHER3 gene followed by 624 amino acids of the extracellular domain (ECD) and a C-terminal 6H is tag (SEQ ID No: 3). The gene was cloned into the pEAK12d expression vector (Edge Biosystems).

[1097] The HER3ECD was produced by transient transfection of HEK293-EBNA cells (Invitrogen). Briefly, cells adapted for suspension growth in DMEM:F12 medium containing 4 ml/L Insulin-Transferrin-Selenium-X supplement (all from Invitrogen) were incubated with plasmid DNA and Poly-Ethylenelmine (PEI, PolySciences) without pre-mixing. After 150 min, transfected cells were diluted 1:3 in Freestyle medium (Invitrogen) and placed on an orbital shaker at 37° C. in a 5% CO2 incubator under agitation at 80 rpm (radius 2.5 cm). Temperature was lowered to 34° C. after 24 h incubation. The supernatant was harvested after 5 days and sterile filtered through a 0.22 μm membrane cartridge (Millipore). The recombinant protein was purified on HisTrap HP metal chelate affinity chromatography column (GE Healthcare) charged with Ni ions, followed by dialysis against PBS.

[1098] 1.3 hHER3 Full Length Sequence—SEQ ID NO: 1

[1099] The human HER3 sequence (SEQ ID No: 1) was synthetically produced and cloned into pcDNA3.1 and pcDNA5/FRT (Invitrogen) respectively. The final expression plasmid pcDNA3.1-hHER3 was used to generate HER3-expressing transfected cell lines.

### 1.4 Generation HER3 Expressing Transfectants

[1100] HEK 293T cells (DSMZ) were transient transfected with pcDNA3.1-hHER3 using Fugene HD (Roche) as transfection agent. Transfected cells were used to immunize llamas. Chinese hamster ovary cells (ATCC) were transfected with pcDNA3.1-hHER3, single cell sorted and selected for high and homogenous expression of HER3 by staining the cells using a HER3-specific monoclonal antibody (R&D Systems) and FACS analysis. One clone was selected and transfected with pcDNA3.1-hygro encoding human HER2 (SEQ ID NO: 9) to obtain HER2/HER3 double transfected cells. The cells were single cell sorted and a clone was selected with high and homogenous expression of HER2 by staining the cells using a HER2-specific monoclonal antibody (R&D Systems) and FACS analysis. These cells were used in binding and competition experiments.

[1101] FlpIn CHO cells (Invitrogen, #R-758-7) were transfected with pcDNA5/FRT-hHER3 plasmid and grown under hygromycin selection.

[1102] A camel cell line (CAKI; Nguyen et al. 2001. Adv. Immunol. 79: 261-296) was transfected with pcDNA3.1-hHER3 (SEQ ID NO: 1) and a single cell sorted clone was selected and used in selection experiments.

### Example 2

### Identification of HER3-Specific Nanobodies

### 2.1 Immunizations

[1103] After approval of the Ethical Committee of the Faculty of Veterinary Medicine (University Ghent, Belgium), 8 llamas were immunized, according to standard protocols. Three llamas (340, 342, 345) received 4 intramuscular injections at biweekly intervals of in-house made HER3-ECD (ECD: extracellular domain) SEQ ID NO: 4 with a dose of 100, 50, 25 and 25 microgram. Five llamas (419, 420, 421, 429, 430) received 4 subcutaneous injections at biweekly intervals of 2×10⁷ transient transfected HEK293-HER3 cells.

### 2.2 Evaluation of Induced Responses in Llama

[1104] At the end of the immunization procedure, sera samples were collected from all animals to evaluate the induction of immune responses against HER3 by ELISA. In short, recombinant human HER3/Fc chimera was immobilized in a 96 well Maxisorp plate (Nunc, Wiesbaden, Germany). After blocking and addition of serum dilutions, specifically bound immunoglobulins were detected using monoclonal antibodies specific to llama IgG1, IgG2 or IgG3 and rabbit anti-mouse horseradish peroxidase conjugate. A significant HER3 specific immune response was observed in all animals. The antibody response was mounted both by the conventional and heavy chain only antibody B-cell repertoires since specifically bound immunoglobulins could be detected with antibodies specifically recognizing the conventional llama IgG1 antibodies or the heavy-chain only llama IgG2 and IgG3 antibodies.

TABLE C-1
Overview of the HER3-specific serum titers. The
serum titer is defined as the highest serum dilution
that results in a signal to noise 1 ≧ 2

| Llama ID | IgG1 | IgG2 | IgG3 |
|---|---|---|---|
| 340 - day 50 | 1.09E+06 | 3.65E+05 | 3.65E+05 |
| 342 - day 50 | 1.09E+06 | 1.22E+05 | 3.65E+05 |
| 345 - day 50 | 1.09E+06 | 4.05E+04 | 4.05E+04 |
| 419 - day 64 | 4.05E+04 | 1.50E+03 | 5.00E+02 |
| 420 - day 64 | 1.50E+03 | <500 | <500 |
| 421 - day 64 | 1.35E+04 | <500 | <500 |
| 429 - day 49 | 1.35E+04 | <500 | <500 |
| 430 - day 49 | 4.05E+04 | <500 | <500 |

¹Signal to noise is defined as the ratio of OD450 nm absorptions of day blood collection after immunization (day 49, 50 or 64) versus pre-immune (day 0) serum sample.

### 2.3 Library Construction

[1105] Peripheral blood mononuclear cells were prepared from the blood samples using Ficoll-Hypaque according to the manufacturer's instructions. Total RNA extracted from these cells and from lymph nodes was used as starting material for RT-PCR to amplify Nanobody encoding gene fragments. These fragments were cloned into phagemid vector pAX50. Phage was prepared according to standard protocols (Phage Display of Peptides and Proteins: A Laboratory Manual, Academic Press; 1st edition (Oct. 28, 1996)) and stored after filter sterilization at 4° C. until further use. In total, 8 phage libraries were constructed (340, 342, 345, 419, 420, 421, 429 and 430), with library sizes between 3×10⁸ and 8.5×10⁸, and a percentage of insert ranging from 91 to 100%.

### 2.4 Selections in Search of HER3-Specific Nanobodies

[1106] To identify Nanobodies recognizing human HER3, the phage libraries were incubated with soluble biotinylated HER3-ECD (SEQ ID NO: 4). The protein was produced as described in Example 1 and biotinylated using Sulfo-NHS-LC-Biotin (Pierce). Complexes of biotinylated HER3 and phage were captured from solution on streptavidin coated magnetic beads. After extensive washing with PBS/0.05% Tween20, bound phage were eluted by addition of 1 mg/ml trypsin or 1 μM HRG (R&D systems). The phage libraries 340, 342 and 345 were incubated with soluble biotinylated human HER3-ECD (0.1-100 nM); phage libraries 419, 420, 421, 429 and 430 with soluble biotinylated human HER3-ECD (1-10-100-1000 nM) in two consecutive rounds. Outputs of these selections were analyzed for enrichment factor (number of phage present in eluate relative to controls) and individual clones from these first round outputs were picked. All phage libraries were also incubated with a Chinese hamster ovary (ATCC) or camel cell line (CAKI cells; Nguyen et al. 2001. Adv. Immunol. 79: 261-296)) transfected with hHER3 (hHER3=human HER3=SEQ ID NO: 1) or with hHER2 and hHER3 (hHER2=human HER2=SEQ ID NO: 9) (5×10⁶ cells) in two consecutive rounds. A third selection strategy consisted of coating plates with a HER3-specific Nanobody (04C07 and 21F06; 10 μg/ml), capture of HER3-ECD (5-100 nM) and addition of the phage libraries in order to enrich phages binding to different epitopes. Trypsin was used to elute phages and outputs were used as input for a second round selection on plates coated with the same or the alternative Nanobody. Individual clones were picked from the different selection conditions.

[1107] All individual clones were grown in 96 deep well plates (1 ml volume). Nanobody expression was induced by adding IPTG to a final concentration of 1 mM. Periplasmic extracts were prepared by freezing the cell pellets and dissolving them in 100 μl PBS. Cell debris was removed by centrifugation.

2.5 Screening for Nanobodies Binding hHER3

[1108] To determine the binding capacity of Nanobodies to hHER3, periplasmic extracts were screened in a cell based binding FACS assay (FACS Array, BectonDickinson). Samples were incubated with Chinese hamster ovary cells transfected with hHER3 or hHER2/hHER3, washed with FACS buffer and binding of the Nanobodies was detected using an anti-c-myc-specific antibody (Serotec). Nanobodies binding to hHER3 were identified.

2.6 Screening for Nanobodies Competing with HRG1-β1 Binding

[1109] To determine the HRG1-β1 (hHRG=human Heregulin) blocking capacity of the Nanobodies, periplasmic extracts were screened in a cell based competition assay using the FMAT technology (Applied Biosystems, Foster City, Calif.). HRG1-β1-EGF (R&D Systems, #396-HB, Accession # NP_{—}039250) was labelled with A647 and incubated with Chinese hamster ovary cells transfected with hHER2/hHER3 in the presence of Nanobodies. Decrease in total FL1 signals indicates that the binding of labelled HRG1-β1 is blocked by the Nanobody present in the periplasmic extract. Nanobodies were identified with different levels of blocking the ligand-receptor interaction, ranging from 100% block to no block. Based on HER3 binding and HRG1-β1 competition screening, a set of HER3 Nanobodies was selected and sequenced. Sequence analysis revealed 204 different families of HER3 specific Nanobodies.

2.7 Surface Plasmon Resonance Analysis of Periplasmic Extracts on hHER3

[1110] Off-rates of the periplasmic extracts containing anti-HER3 Nanobodies were measured by Surface Plasmon Resonance (SPR) using a Biacore T100 instrument. Human HER3-ECD (SEQ ID NO: 4) was covalently bound to a CM sensor chip surface via amine coupling using EDC/NHS for activation and ethanolamine HCl for deactivation. Periplasmic extracts containing HER3-specific Nanobodies were injected for 2 minutes at a flow rate of 45 μl/min to allow binding to chip-bound antigen. Next, binding buffer without periplasmic extracts was sent over the chip at the same flow rate to allow spontaneous dissociation of bound Nanobody. From the sensorgrams obtained for the different periplasmic extracts k_{off}-values (k_{d}) were calculated.

### 2.8 Screening for Nanobodies Inhibiting Ligand Dependent HER3 Phosphorylation

[1111] To identify HER3-specific Nanobodies with a capacity to block HER3 phosphorylation, periplasmic extracts were incubated with serum-starved MCF-7 cells followed by 5 nM HRG1-β1-EGF stimulation for 15 minutes. Cell lysates were made and phosphorylation of HER3 was measured using the DuoSet IC human phospho-HER3ELISA (R&D systems, DYC1769-2). Nanobodies were identified with different levels of inhibiting the ligand-induced pHER3, ranging from 100% block to no inhibition.

### 2.9 Epitope Binning of Nanobodies

[1112] Six HER3-specific Nanobodies were biotinylated and used in alphascreen and/or FACS competition assays to group Nanobody families in different epitope bins. In the FACS assay, periplasmic extracts containing HER3-specific Nanobodies were incubated in presence of one out of the six biotinylated Nanobodies (used concentrations are indicated in Table C-2). The incubation mixtures were subsequently added to HER2/HER3 transfected CHO cells. After 90 minutes incubation, the cells were washed and binding of the biotinylated Nanobody was detected using streptavidin-PE. The obtained fluorescent signal is compared to the signal obtained from a condition where the biotinylated Nanobody was added to the cells without periplasmic extract Nanobody.

[1113] For the alphascreen competition assay, human HER3-Fc (R&D Systems, 348-RB) was captured on anti-human Fc Nanobody conjugated Acceptor beads which were prepared according to the manufacturer's instructions (PerkinElmer). To evaluate the blocking capacity of anti-HER3 Nanobodies, dilutions of the periplasmic extracts were added to one of the biotinylated Nanobodies (see Table C-2). To this mixture, human HER3-Fc-Acceptor beads were added and incubated for 1 hour at room temperature. Then, the streptavidin-coupled Donor beads were added and further incubated for 1 hour at room temperature. Fluorescence was measured using the EnVision Multilabel Plate Reader (PerkinElmer) using an excitation wavelength of 680 nm and an emission wavelength of 520 nm.

TABLE C-2
Concentrations of biotinylated Nanobodies used in
epitope competition FACS and alphascreen and concentrations
human HER3-Fc used in alphascreen.

| | |
|---|---|
| FACS | Alphascreen |

| | Concentration | | | Concentration |
|---|---|---|---|---|
| | biotinylated | | Concentration | biotinylated |
| | Nanobody | | hHER3-Fc | Nanobody |
| 04C07 | 3 | nM | 0.26 nM | 0.1 nM |
| 21B02 | 0.9 | nM | 0.26 nM | 0.26 nM |
| 23F05 | 0.83 | nM | 0.1 nM | 0.04 nM |
| 18E08 | 60 | nM | 1.6 nM | 4 nM |
| 17C08 | 20 | nM | NA | NA |
| 04F10 | 100 | nM | NA | NA |

NA: not applicable

[1114] Non-competing Nanobodies were grouped in different epitope groups. Five different groups were identified based on the alphascreen and FACS competition results.

### Example 3

### Expression and Purification of hHER3-Specific Nanobodies

[1115] Based on the described screening assays, 15 Nanobodies were selected for further characterization. These Nanobodies belong to 13 different families and five different epitope bins. Sequences are shown in Table A-1 (SEQ ID NOs: 12 to 26).

[1116] Nanobodies were expressed in E. coli TG1 cells as c-myc, His6-tagged proteins in a culture volume of 500 mL. Expression was induced by addition of 1 mM IPTG and allowed to continue for 3 h at 37° C. After spinning the cell cultures, periplasmic extracts were prepared by freeze-thawing the pellets and resuspension in dPBS. These extracts were used as starting material for immobilized metal affinity chromatography (IMAC) using Histrap FF crude columns (GE Healthcare). Nanobodies were eluted from the column with 250 mM imidazole and subsequently desalted towards dPBS (Dulbecco's Phosphate Buffered Saline).

### Example 4

### Binding Capacity of Purified Nanobodies to hHER3 in ELISA

[1117] The binding capacity of 14 purified Nanobodies belonging to 5 different epitope bins was determined in ELISA. 96-well plates were coated with hHER3-ECD (1 μg/ml). A dilution series of each Nanobody starting from 500 nM down to 6 pM was tested and detected using mouse anti c-myc (Roche) and anti-mouse-HRP (Dako cytomation). All Nanobodies bind to hHER3-ECD and the obtained EC50 values are shown in Table C-3.

TABLE C-3
EC50 values for various anti-HER3 Nanobodies to hHER3-ECD and
their 95% confidence intervals (CI) as determined by ELISA

| | SEQ ID NO | EC50 (nM) | CI95 |
|---|---|---|---|
| 04C07 | 15 | 0.86 | 0.5-1.6 |
| 05A09 | 19 | 1.45 | 0.92-2.3 |
| 17B05 | 13 | 0.63 | 0.35-1.13 |
| 17C08 | 20 | 0.62 | 0.4-0.96 |
| 17E08 | 25 | 1.02 | 0.48-2.15 |
| 18B05 | 14 | 0.4 | 0.2-0.83 |
| 18E08 | 17 | 4.7 | 3.3-6.8 |
| 18F05 | 12 | 0.29 | 0.15-0.55 |
| 18G11 | 16 | 0.72 | 0.39-1.33 |
| 21B02 | 21 | 1.1 | 0.7-1.6 |
| 21F06 | 22 | 0.3 | 0.14-0.65 |
| 23F05 | 23 | 0.46 | 0.28-0.77 |
| 34A04 | 24 | 0.57 | 0.35-0.92 |
| 34C07 | 18 | 0.46 | 0.26-0.8 |

### Example 5

### Affinity of Purified Nanobodies

[1118] Affinity measurements were performed using a Biacore T100 instrument by coating anti-human Fc antibody (GE Healthcare) to a CM sensorchip surface via amine coupling using EDC/NHS for activation and ethanolamine HCl for deactivation. HER3-Fc (R&D systems, 348-RB 5 μg/ml; 120 s; 10 μl/min) was injected to allow capturing by the coated anti-Fc antibody. Then, purified Nanobodies were injected for 2 minutes at a flow rate of 10 μl/min to allow binding to chip-bound antigen. Next, binding buffer without Nanobodies was sent over the chip at the same flow rate to allow spontaneous dissociation of bound Nanobody. The kinetic parameters kₒₙ-values (kₐ), k_{off}-values (k_{d}) and K_{D} were calculated from the sensorgrams obtained for the different Nanobodies (Table C-4).

TABLE C-4
Kinetic parameters for purified HER3-specific Nanobodies.

| | kₐ (1/Ms) | k_{d} (1/Ms) | KD (nM) |
|---|---|---|---|
| 04C07 | 1.20E+06 | 2.60E−04 | 0.22 |
| 17B05 | 3.90E+05 | 4.30E−05 | 0.11 |
| 17C08* | 8.40E+03 | 4.10E−04 | 48 |
| 17E08 | 3.63E+05 | 4.10E−05 | 0.11 |
| 18B05 | 4.90E+05 | 1.42E−04 | 0.29 |
| 18E08 | 1.04E+04 | 5.61E−04 | 53.8 |
| 18F05 | 4.27E+05 | 1.04E−04 | 0.24 |
| 18G11 | 2.60E+04 | 2.70E−04 | 10 |
| 21B02 | 2.20E+06 | 2.60E−03 | 1.22 |
| 21F06 | 1.80E+07 | 2.20E−03 | 0.12 |
| 23F05 | 3.10E+06 | 3.10E−03 | 0.99 |
| 34A04 | 2.63E+06 | 7.06E−03 | 2.7 |
| 34C07** | 1.80E+04 | 2.50E−04 | 14 |
| Control Fab1 | 7.03E+05 | 3.98E−04 | 0.57 |
| Control Fab2 | 9.34E+04 | 2.59E−04 | 2.77 |

*Heterogenous curve: results of main interaction (89%) presented
**Heterogenous curve: results of main interaction (84%) presented

### Example 6

### Binding Capacity of Purified Nanobodies to cynoHER3 in ELISA

[1119] The binding capacity of the selected purified Nanobodies was determined in ELISA. 96-well plates were coated with cHER3-ECD (1 μg/ml) (SEQ ID NO: 4). A dilution series of each Nanobody starting from 500 nM down to 6 pM was tested and detected using mouse anti c-myc (Roche) and anti-mouse-HRP (Dako cytomation). All Nanobodies bind to cyno HER3-ECD and the obtained EC50 values are shown in Table C-5.

TABLE C-5
EC50 values for various anti-HER3 Nanobodies to cyno HER3-
ECD and their 95% confidence intervals as determined by ELISA

| | EC50 (nM) | CI95 |
|---|---|---|
| 04C07 | 0.93 | 0.5-1.6 |
| 05A09 | 1.3 | 0.83-2.03 |
| 17B05 | 0.66 | 0.4-1.08 |
| 17C08 | 0.59 | 0.39-0.89 |
| 17E08 | 1.15 | 0.65-2.05 |
| 18B05 | 0.45 | 0.26-0.78 |
| 18E08 | 4.4 | 3.4-5.7 |
| 18F05 | 0.29 | 0.16-0.55 |
| 18G11 | 0.64 | 0.36-1.13 |
| 21B02 | 0.9 | 0.6-1.3 |
| 21F06 | 0.32 | 0.15-0.68 |
| 23F05 | 0.44 | 0.26-0.74 |
| 34A04 | 0.49 | 0.31-0.78 |
| 34C07 | 0.43 | 0.24-0.76 |

### Example 7

### HER3-Specificity of Purified Nanobodies

[1120] Off-target binding of purified HER3 Nanobodies was assessed by measuring their binding capacity to Chinese hamster ovary (CHO) cells transfected with human HER1 (SEQ ID NO: 8), human HER2 (SEQ ID NO: 9) or human HER4 (SEQ ID NO: 10) by FACS. Non-transfected cells were used to check binding to the cell background. Purified HER3-specific Nanobodies (2000-666-222 nM) were added to 2×10⁵ cells, 30 minutes incubated at 4° C. and detected using mouse anti-c-myc (Serotec) and goat anti-mouse-PE (Jackson Immuno-Research Laboratories). Binding of polyclonal antibodies (anti-HER1, R&D Systems AF231; anti-HER2, R&D Systems AF1129; anti-HER4, R&D Systems AF1131) were used as positive control. Low binding levels were observed for Nanobody 21B02 to HER2, whereas the other purified Nanobodies did not bind to HER1, HER2 and HER4 transfected cells (Table C-6).

TABLE C-6
Binding of purified Nanobodies and control polyclonal antibodies to Chinese hamster ovary ovary cells
transfected with HER1, HER2 or HER4 as determined by FACS (data represent MCF values).

| | HER1 | | | HER2 | | | HER4 | | |
|---|---|---|---|---|---|---|---|---|---|
| | 2000 nM | 667 nM | 222 nM | 2000 nM | 667 nM | 222 nM | 2000 nM | 667 nM | 222 nM |
| | Nb | Nb | Nb | Nb | Nb | Nb | Nb | Nb | Nb |
| 04C07 | 72 | 92 | 75 | 154 | 79 | 84 | 105 | 103 | 96 |
| 17B05 | 49 | 64 | 85 | 134 | 86 | 84 | 116 | 90 | 142 |
| 17C08 | 58 | 47 | 62 | 1218 | 418 | 160 | 254 | 91 | 210 |
| 17E08 | 59 | 52 | 66 | 73 | 51 | 51 | 242 | 117 | 110 |
| 18B05 | 61 | 101 | 82 | 77 | 63 | 61 | 96 | 95 | 60 |
| 18E08 | 64 | 62 | 61 | 78 | 52 | 53 | 115 | 80 | 91 |
| 18F05 | 133 | 60 | 154 | 256 | 347 | 436 | 120 | 149 | 149 |
| 18G11 | 97 | 87 | 101 | 65 | 117 | 109 | 124 | 56 | 57 |
| 19E03 | 91 | 104 | 81 | 167 | 78 | 99 | 140 | 110 | 77 |
| 21B02 | 53 | 64 | 64 | 8574 | 3609 | 1342 | 273 | 119 | 91 |
| 21F06 | 74 | 110 | 107 | 409 | 229 | 84 | 263 | 225 | 149 |
| 23F05 | 67 | 67 | 153 | 832 | 264 | 97 | 95 | 101 | 343 |
| Anti-HER1 pAb (5 μg/ml) | 28217 | | | 888 | | | 418 | | |
| Anti-HER2 pAb (5 μg/ml) | 323 | | | 41048 | | | 578 | | |
| Anti-HER4 pAb (5 μg/ml) | 584 | | | 932 | | | 16981 | | |

### Example 8

### Epitope Mapping of Purified Nanobody Panel

[1121] The classification of Nanobodies in the different epitope bins was an important criterium to select Nanobodies for purification and further characterization (see Examples 2.9 and 3). The FACS competition assay using the biotinylated Nanobodies 04C07 (also denoted as 4C07), 21B02, 23F05, 18E08, 17C08 and 04F10 (also denoted as 4F10) was repeated with three different concentrations of 14 selected purified Nanobodies (400, 100 and 25 nM). The Nanobodies belonging to group 1 and group 2 are very similar but differ in their capacity to compete with Nanobody 04F10 (Table C-7). The Nanobodies of group 3 and group 4 are also very similar but differ in their capacity to compete with 04F10 and 17C08. The Nanobodies classified in one epitope group are considered to bind to identical epitopes, whereas Nanobodies of different epitope groups are considered to bind to partially overlapping (group 1-2 and group 3-4) or non-overlapping epitopes.

TABLE C-7
Epitope competition FACS of 14 selected purified
Nanobodies against biotinylated Nanobodies. The data
represent the percentage competition at a 400 nM
concentration of the non-biotinylated Nanobody.

| | | | | | | | Epi- |
|---|---|---|---|---|---|---|---|
| Nano- | 04C07- | 21B02- | 23F05- | 18E08- | 17C08- | 04F10- | tope |
| body | biotin | biotin | biotin | biotin | biotin | biotin | group |
| 17B05 | 100 | 0 | 0 | 0 | 0 | 68 | 1 |
| 17E08 | 100 | 5 | 0 | 0 | 0 | 32 | 1 |
| 18B05 | 98 | 0 | 0 | 0 | 0 | 31 | 1 |
| 18F05 | 100 | 0 | 0 | 0 | 0 | 15 | 1 |
| 04C07 | 100 | 2 | 0 | 26 | 15 | 0 | 2 |
| 05A09 | 0 | 22 | 10 | 78 | 48 | 0 | 3 |
| 18E08 | 0 | 4 | 0 | 86 | 63 | 0 | 3 |
| 18G11 | 0 | 0 | 0 | 97 | 74 | 0 | 3 |
| 34C07 | 0 | 6 | 10 | 99 | 56 | 0 | 3 |
| 17C08 | 3 | 16 | 17 | 98 | 97 | 77 | 4 |
| 21B02 | 10 | 100 | 98 | 20 | 17 | 15 | 5 |
| 21F06 | 11 | 100 | 100 | ND | 9 | 15 | 5 |
| 23F05 | 6 | 100 | 100 | 16 | 8 | 15 | 5 |
| 34A04 | 22 | 99 | 97 | 25 | 14 | 3 | 5 |

ND: not determined

[1122] To obtain more insight in the epitopes recognized by selected purified Nanobodies, various human-chicken HER3 chimeric proteins were engineered, based on the division of the HER3 extracellular domain into four distinct domains. Plasmids were constructed which encode the transmembrane and extracellular regions of chicken HER3 (based on sequence Genbank accession nr: DQ358720) and variants with individual domains from human HER3 swapped into the chicken scaffold but using the human signal sequence:
[1123] Chicken Her3: AA1-25 human, AA26-642 chicken (SEQ ID NO: 2)
[1124] Chimeric chicken Her3-human domain 1: AA1-206 human, AA207-642 chicken (SEQ ID NO: 5)
[1125] Chimeric chicken Her3-human domain 2: AA1-25 human, AA26-206 chicken, AA207-328 human, AA329-642 chicken (SEQ ID NO: 6)
[1126] Chimeric chicken Her3-human domain 4: AA1-25 human, AA26-495 chicken, AA496-642 human (SEQ ID NO: 7)

[1127] The HER3-encoding fragments were synthetically produced and cloned in pcDNA3.1 (Invitrogen). HEK293 (DSMZ) cells were transient transfected with chicken or chimeric HER3 constructs. Surface expression of the constructs was confirmed using a goat anti-hHER3 polyclonal antibody (R&D systems). The Nanobodies were incubated with the transient transfected cells and binding was detected using anti-c-myc and goat anti-mouse-PE. Result of the binding study is shown in FIG. 2. In summary, Nanobodies 17B05, 17E08, 18B05, 18F05 and 04C07 (epitope groups 1 and 2) recognize human domain 1 while Nanobodies 18E08 and 18G11 (epitope group 3) bind to human domain 2. Nanobody 17C08 (epitope group 4) recognizes both domain 1 and domain 2. Three Nanobodies (21B02, 21F06 and 23F05 (epitope group 5)) showed chicken cross-reactivity, hence corresponding epitopes could not be mapped to a specific human HER3 domain.

[1128] Domain 1 is involved in ligand binding whereas the dimerization loop involved in HER dimerization is located in domain 2 (Baselga and Swain, 2009 Nature Reviews Cancer Vol 9, p 463-475). Therefore, the mode of action of Nanobodies binding to domain 1 could be related with inhibition of ligand binding and that of Nanobodies binding to domain 2 could be related with blocking HER dimerization

### Example 9

### HRG1-β1 Competition Capacity of Purified Nanobodies in FACS

[1129] The HRG1-β1 competition capacity of purified HER3-specific Nanobodies was determined in a FACS competition experiment using Chinese hamster ovary cells (CHO FlpIn, Invitrogen) transfected with hHER3. A dilution series of each Nanobody starting from 600 nM down to 0.03 nM and 0.8 nM HRG1-β1-EGF (R&D systems, #396-HB) were added to the cells (2×10⁵) and incubated during 90 minutes at 4° C. After washing the cells with FACS buffer, detection was performed using goat anti-HRG ECD (R&D systems) and donkey anti-goat PE (Jackson ImmunoResearch Laboratories). Nanobodies showed complete competition with HRG1-β1-EGF for HER3 binding, except for Nanobodies 18E08 and 18G11 which did not compete and Nanobody 17C08 which only partially blocked (75%) at a Nanobody concentration of 600 nM. The obtained IC50 values are shown in Table C-8. The lower HRG1-β1 blocking capacity of Nanobodies belonging to epitope group 3 and in lesser extent also group 4 is in agreement with their binding to domain 2 and blocking HER transphosphorylation as mode of action.

TABLE C-8
IC50 values for competition between HRG1-β1-EGF and various
anti-HER3 Nanobodies to CHO cells transfected with HER3 and
their 95% confidence intervals as determined by FACS.

| | IC50 (nM) | CI95 |
|---|---|---|
| 04C07 | 4.26 | 3.13-5.81 |
| 17B05 | 33.4 | 29.04-38.40 |
| 17C08 | Partial competition | NA |
| 17E08 | 75.9 | 64.94-88.73 |
| 18B05 | 16.15 | 11.80-22.09 |
| 18E08 | No competition | NA |
| 18F05 | 20.11 | 15.63-25.88 |
| 18G11 | No competition | NA |
| 21B02 | 13.29 | 9.09-19.44 |
| 21F06 | 10.1 | 7.44-13.71 |
| 23F05 | 9.44 | 8.20-10.88 |
| Control MAb1 | 9.4 | 7.5-11.8 |
| Control MAb2 | 67.2 | 46.4-97.3 |

NA: not applicable.

### Example 10

### Inhibition of HER3, Akt and ERK1/2 Phosphorylation by purified Nanobodies

[1130] To determine the potency of monovalent Nanobodies in inhibiting ligand induced HER3 phosphorylation and downstream signaling, Nanobodies were tested in cell based assays as described below.

[1131] Inhibition of ligand induced pHER3 (phosphoHER3) in MCF-7 cells (cell based electrochemiluminescence assay (ECLA)): MCF-7 cells (ATCC HTB 22) were serum starved and pre-incubated with Nanobodies (serial dilutions, starting concentration 666 nM) in serum-free media for 60 min at 37° C., 5% CO₂. Cells were stimulated with 50 ng/ml HRG1-β1 EGF domain (R&D Systems, #396-HB) for 10 min, supernatants discarded and cells lysed in cold NP-40 lysis buffer (1% NP-40, 20 mM Tris, pH8.0, 137 mM NaCl, 10% glycerol, 2 mM EDTA, protease inhibitor cocktail set III (Calbiochem), phosphatase inhibitor cocktail set II (Calbiochem)). MA6000 96 well plates (MSD, # L15XB) were blocked with 3% block A (MSD) in PBS, pH7.4, 0.05% Tween20 and coated with HER3 specific capture antibody (R&D Systems, # MAB3481). Cell lysates were added and incubated for 2 h at room temperature (RT). Biotinylated anti-phospho Tyrosine antibody (R&D Systems, # BAM1676) and sulfo tag streptavidin reagent (MSD, #R32AD) were used for detection (Table C-9).

10.1 Inhibition of Downstream Signaling (pAkt/pERK1/2):

[1132] MCF-7 cells were pre-incubated with Nanobodies and stimulated as described above. Cell lysates were tested in Phospho-Akt (Ser473) Whole Cell Lysate Kit (MSD, # K151CAD) and Phospho-ERK1/2 Whole Cell Lysate Kit (MSD, # K111DWD) according to manufacturer's instructions (Table C-10).

10.2 Inhibition of EGFR/HER3 and HER2/HER3 Transphosphorylation: MDA MB468 (ATCC HTB 132) and CHO HER2/HER3 cells were serum starved and treated as described above (MDA MB468 stimulation with 50 ng/ml HRG1-β1 EGF domain; CHO HER2/HER3 cells stimulation with 100 ng/ml HRG1-β1 EGF domain). Cell lysates were tested in pHER3 ECLA (Table C-9).

TABLE C-9
Inhibition of HRG1-β1 dependent HER3
phosphorylation by purified Nanobodies

| | | CHO-HER2/HER3 | MDA-MB468 |
|---|---|---|---|
| Nanobody | MCF-7 (IC50 M) | (IC50 M) | (IC50 M) |
| 04C07 | 1.07E−09 | 2.407E−09 | 6.68E−09 |
| 17B05 | 5.34E−09 | 1.18E−09 | 2.79E−08 |
| 18B05 | 5.18E−09 | 3.87E−09 | 3.00E−08 |
| 18F05 | 1.53E−09 | 3.03E−09 | 1.80E−08 |
| 17E08 | 4.51E−09 | 8.01E−10 | 2.46E−08 |
| 18E08 | 6.39E−08 | <50% | 1.01E−07 |
| 18G11 | 1.03E−08 | 2.13E−08 | 7.03E−09 |
| 05A09 | 9.12E−08 | <50% | 1.28E−07 |
| 34C07 | 1.89E−08 | 3.53E−08 | 1.07E−08 |
| 21B02 | 4.88E−08 | <50% | 9.99E−08 |
| 21F06 | 6.789E−09 | 1.447E−08 | 7.94E−09 |
| 23F05 | 1.77E−08 | 7.63E−08 | 2.41E−08 |
| 34A04 | 3.02E−08 | 1.34E−07 | 2.205E−08 |
| 17C08 | 8.98E−08 | <50% | 5.38E−08 |

<50% = less than 50% inhibition

TABLE C-10
Inhibition of HRG1-β1 induced pAKT and pERK1/2

| Nanobody | pAkt (IC₅₀ M) | pERK1/2 (IC₅₀ M) |
|---|---|---|
| 04C07 | 1.09E−08 | 2.79E−08 |
| 17B05 | 7.83E−09 | 2.36E−09 |
| 18B05 | 6.02E−09 | <50% |
| 18F05 | 8.04E−09 | 8.98E−08 |
| 17E08 | 5.78E−09 | 2.78E−09 |
| 18E08 | 5.69E−08 | <50% |
| 18G11 | 1.38E−07 | <50% |
| 05A09 | 2.898E−07 | <50% |
| 34C07 | 4.99E−08 | 1.00E−07 |
| 21B02 | 6.90E−08 | <50% |
| 21F06 | 2.31E−08 | 1.11E−07 |
| 23F05 | 4.648E−08 | <50% |
| 34A04 | 6.255E−08 | 3.13E−07 |
| 17C08 | 7.24E−07 | <50% |

<50% = less than 50% inhibition

[1133] Purified Nanobodies potently inhibited HRG1-131 induced HER3 phosphorylation in MCF-7 cells, and cells expressing EGFR/HER3 (MDA MB468) or HER2/HER3 respectively (CHO HER2/HER3) with the exceptions of 18E08, 05A09, 21B02, and 17C08 which showed less than 50% inhibition of pHER3 in CHO HER2/HER3 cells. PI3Kinase pathway (pAkt) inhibition could be detected with all Nanobodies. To a lesser extent downstream signaling through pERK1/2 could be blocked by Nanobodies.

[1134] The data described in Examples 9 and 10 suggest that Nanobodies of group 3 block transphosphorylation of HER3 without blocking ligand binding.

### Example 11

### Migration Blocking Capacity of Purified Nanobodies

[1135] The ability of Nanobodies to inhibit HRG1-β1 dependent cell migration was assessed in the following assay. A431 cells (CRL 1555) were seeded in HTS Fluoroblok 96 well plate inserts (BD Falcon #351164) in the presence of Nanobodies (serial dilutions; starting at 666 nM). Media plus 500 nM HRG1-β1 extracellular domain (R&D Systems, #377-HB) was added to the bottom wells. Migrated cells were stained with CalceinAM and fluorescence detected by plate reader. Nanobodies inhibiting ligand dependent cancer cell migration could be identified (Table C-11).

TABLE C-11
Inhibition of HRG1-β1 induced cell migration

| Nanobody | IC₅₀ M |
|---|---|
| 04C07 | 6.52E−09 |
| 17B05 | 3.04E−09 |
| 18B05 | <50% |
| 18F05 | 1.52E−07 |
| 17E08 | 5.76E−08 |
| 18E08 | <50% |
| 21B02 | <50% |
| 21F06 | 4.00E−08 |
| 23F05 | 3.68E−07 |
| 04F10 | no effect |
| 17C08 | no effect |
| 18G11 | 6.79E−08 |
| 34C07 | 1.37E−07 |

<50% = less than 50% inhibition

### Example 12

### Generation of Formatted Nanobodies

[1136] The structural requirement for multi-specificity is to fuse two or more binding domains together, with sufficient flexibility to allow simultaneous binding to different target epitopes and/or combine binding domains with a different mode of action (blocking ligand binding and blocking HER dimerization) in one molecule.

[1137] Nanobodies binding to different epitopes were combined in one molecule and fused to an anti-albumin binding Nanobody to increase the half-life of the molecule. GS-linkers were inserted between the Nanobody building blocks. Binding of the two HER3-specific Nanobody building blocks simultaneously without a significant loss of entropy increased binding affinity to the target, resulting in higher potency and/or higher specificity. Careful selection of the epitopes targeted on the antigen and optimal design of linkers to allow maximal flexibility of the binding domains resulted in the blocking of two or more critical sites of the target. The amino acid sequences of selected formatted Nanobody constructs are shown in Table A-2.

### Example 13

### Analysis of the HER1-HER3 Heterodimerization Blocking Capacity of Monovalent Nanobody 17B05

[1138] To determine the potency of monovalent Nanobodies in inhibiting EGFR ligand induced HER3 phosphorylation Nanobodies were tested in cell based assays as described below.

[1139] Inhibition of EGFR ligand induced pHER3 (phosphoHER3) in CHO EGFR/Her3 cells (cell based electrochemiluminescence assay (ECLA)): CHO EGFR/Her3 were serum starved and pre-incubated with Nanobodies or EGFR antibody cetuximab (serial dilutions, starting concentration 666 nM or 167 nM) in serum-free media for 60 min at 37° C., 5% CO₂. Cells were stimulated with 100 ng/ml rhTGFα (R&D Systems, #239-A), EGF (Sigma#E-9644), or rh epiregulin (R&D Systems, #1195EP) respectively for 10 min, supernatants discarded and cells lysed in cold NP-40 lysis buffer (1% NP-40, 20 mM Tris, pH8.0, 137 mM NaCl, 10% glycerole, 2 mM EDTA, protease inhibitor cocktail set III (Calbiochem), phosphatase inhibitor cocktail set II (Calbiochem)). MA6000 96 well plates (MSD, # L15XB) were blocked with 3% block A (MSD) in PBS, pH7.4, 0.05% Tween20 and coated with HER3 specific capture antibody (R&D Systems, # MAB3481). Cell lysates were added and incubated for 2 h at room temperature (RT). Biotinylated anti-phospho Tyrosine antibody (R&D Systems, # BAM1676) and sulfo tag streptavidin reagent (MSD, #R32AD) were used for detection (Table C-12). Monovalent Nanobody 17B05 was able to potently block EGFR ligand induced HER3 phosphorylation, whereas domain II binders 18G11 and 34C07 were not able to block EGFR ligand induced HER3 phosphorylation.

TABLE C-12
Inhibition of EGFR ligand induced HER3 phosphorylation

| | CHO | CHO | CHO |
|---|---|---|---|
| | EGFR/HER3 + | EGFR/HER3 + | EGFR/HER3 + |
| | TGFα | EGF | epiregulin |
| Nanobody/antibody | (IC50 M) | (IC50 M) | (IC50 M) |
| cetuximab | 1.09e−009 | 1.29e−009 | 6.35e−010 |
| 18G11 | no effect | no effect | no effect |
| 34C07 | no effect | no effect | no effect |
| 17B05 | 8.15e−010 | 3.43e−010 | 2.48e−010 |
| control Mab-1 | no effect | no effect | <50% |
| control Mab-2 | no effect | no effect | 2.36e−007 |

<50% = less than 50% inhibition

### Example 14

### Generation of Multivalent Parental HER3-Specific Nanobodies with Half-Life Extension (HLE)

[1140] In order to generate a half-life extended Nanobody product that blocks HRG binding to HER3 and also blocks heterodimerization of HER3, the monovalent lead panel Nanobodies (4C07, 17C08, 18G11, 21F06, 34C07 and 17B05) were formatted to bivalent and multivalent molecules.

[1141] For half-life extension, it was opted to fuse the constructs to the anti-HSA Nanobody ALB11.A library approach was used to make all possible Nanobody1-35GS-Nanobody2-9GS-ALB11 combinations. The multivalent Nanobodies were expressed as c-myc, His6-tagged protein in Pichia pastoris. Induction of Nanobody expression occurred by stepwise addition of methanol. Clarified medium with secreted Nanobody was used as starting material for immobilized metal affinity chromatography (IMAC) followed by desalting resulting in at least 90% purity as assessed by SDS-PAGE. The purified multivalent parental HER3-specific Nanobodies were tested in a HRG-blocking alphascreen using 20 nM HRG and 0.05 nM HER3-Fc. The results indicated that the best Nanobody building block determined the potency of the formatted Nanobodies (Table C-13). Nanobody 21F06 was the most potent monovalent building block in this assay (IC50 1.35E-11 M) and all constructs containing 21F06 as building block have IC50s between 5.69E-12 M and 5.77E-11 M.

TABLE C-13
HRG competition alphascreen results of multivalent parental anti-HER3 Nanobodies

| construct | Nb1 | linker | Nb2 | linker | ALB11 | IC50 (M) | CI95 (M) | % inhibition |
|---|---|---|---|---|---|---|---|---|
| HER3MS00022 | 21F06 | 35GS | 21F06 | 9GS | ALB11 | 5.69E−12 | [4E−12, 8E−12] | 103% |
| HER3MS00024 | 21F06 | 35GS | 4C07 | 9GS | ALB11 | 8.98E−12 | [6E−12, 13E−12] | 104% |
| HER3MS00034 | 21F06 | 35GS | 18G11 | 9GS | ALB11 | 1.06E−11 | [0.8E−11, 1.3E−11] | 99.40% |
| HER3MS21F06 | 21F06 | | | | | 1.35E−11 | [0.5E−11, 2.9E−11] | 103.7% |
| HER3MS00060 | 21F06 | 35GS | 17B05 | 9GS | ALB11 | 1.2E−11 | [9.4E−12, 1.4E−11] | 108% |
| HER3MS00023 | 21F06 | 35GS | 34C07 | 9GS | ALB11 | 1.57E−11 | [1.3E−11, 1.9E−11] | 102% |
| HER3MS00030 | 4C07 | 35GS | 21F06 | 9GS | ALB11 | 1.58E−11 | [1.4E−11, 1.8E−11] | 101.70% |
| HER3MS00037 | 18G11 | 35GS | 18G11 | 9GS | ALB11 | 1.59E−11 | [1.2E−11, 2.1E−11] | 107% |
| HER3MS00061 | 17B05 | 35GS | 21F06 | 9GS | ALB11 | 2.5E−11 | [1.9E−11, 3.1-11] | 108% |
| HER3MS00026 | 34C07 | 35GS | 21F06 | 9GS | ALB11 | 5.77E−11 | [4.4E−11, 7.6E−11] | 104% |
| HER3MS00055 | 4C07 | 35GS | 17B05 | 9GS | ALB11 | 1.2E−10 | [8.9E−11, 1.5E−10] | 87% |
| HER3MS00032 | 4C07 | 35GS | 4C07 | 9GS | ALB11 | 1.32E−10 | [1.14E−10, 1.52E−10] | 86.60% |
| HER3MS00035 | 4C07 | 35GS | 18G11 | 9GS | ALB11 | 1.34E−10 | [1.08E−11, 1.67E−11] | 90.40% |
| HER3MS00031 | 4C07 | 35GS | 34C07 | 9GS | ALB11 | 1.57E−10 | [1.15E−10, 2.14E−10] | 87.40% |
| HER3MS00039 | 18G11 | 35GS | 4C07 | 9GS | ALB11 | 2.14E−10 | [1.72E−10, 2.68E−10] | 90.70% |
| HER3MS00057 | 17B05 | 35GS | 4C07 | 9GS | ALB11 | 2.2E−10 | [1.7E−10, 2.9E−10] | 88% |
| HER3MS04C07 | 4C07 | | | | | 2.64E−10 | [2.6E−10, 3.2E−10] | 86.70% |
| HER3MS00056 | 17B05 | 35GS | 17B05 | 9GS | ALB11 | 3.1E−10 | [2.3E−10, 4.2E−10] | 88% |
| HER3MS00054 | 17B05 | 35GS | 34C07 | 9GS | ALB11 | 3.2E−10 | [2.8E−10, 3.6E−10] | 89% |
| HER3MS00028 | 34C07 | 35GS | 4C07 | 9GS | ALB11 | 3.27E−10 | [2.4E−10, 4.5E−10] | 88.60% |
| HER3MS00058 | 17B05 | 35GS | 18G11 | 9GS | ALB11 | 4.2E−10 | [3.4E−10, 5.2E−10] | 96% |
| HER3MS00051 | 34C07 | 35GS | 17B05 | 9GS | ALB11 | 4.6E−10 | [3.6E−10, 5.7E−10] | 95% |
| HER3MS00038 | 18G11 | 35GS | 21F06 | 9GS | ALB11 | 4.76E−10 | [3.51E−10, 6.46E−10] | 96% |
| HER3MS17B05 | 17B05 | | | | | 7.55E−10 | [4.5E−10, 8.1E−10] | 87% |
| HER3MS00052 | 18G11 | 35GS | 17B05 | 9GS | ALB11 | 7.6E−10 | [6.6E−10, 8.8E−10] | 97% |
| HER3MS34C07 | 34C07 | | | | | 8.15E−10 | [2.16E−10, 9.8E−10] | 65.20% |
| HER3MS18G11 | 18G11 | | | | | no comp | NA | no comp |

### Example 15

### Analysis of the HRG Induced Signaling Blocking Capacity of the Multivalent Parental Nanobodies with ALB11 HLE in Cellular Assays

[1142] To determine the potency of multivalent Nanobodies in inhibiting ligand induced HER3 phosphorylation and EGFR/Her3 and Her2/Her3 transphosphorylation, Nanobodies were tested in cell based assays as described below. Inhibition of ligand induced pHER3 (phosphoHER3) in MCF-7 cells (cell based electrochemiluminescence assay (ECLA)): MCF-7 cells (ATCC HTB 22) were serum starved and pre-incubated with Nanobodies (serial dilutions, starting concentration 666 nM or 167 nM) in serum-free media for 60 min at 37° C., 5% CO2. Cells were stimulated with 50 ng/ml HRG1-β1 EGF domain (R&D Systems, #396-HB) for 10 min, supernatants discarded and cells lysed in cold NP-40 lysis buffer (1% NP-40, 20 mM Tris, pH8.0, 137 mM NaCl, 10% glycerol, 2 mM EDTA, protease inhibitor cocktail set III (Calbiochem), phosphatase inhibitor cocktail set II (Calbiochem)). MA6000 96 well plates (MSD, # L15XB) were blocked with 3% block A (MSD) in PBS, pH7.4, 0.05% Tween20 and coated with HER3 specific capture antibody (R&D Systems, # MAB3481). Cell lysates were added and incubated for 2 h at room temperature (RT). Biotinylated anti-phospho Tyrosine antibody (R&D Systems, # BAM1676) and sulfo tag streptavidin reagent (MSD, #R32AD) were used for detection (Table C-14). Inhibition of EGFR/HER3 and HER2/HER3 transphosphorylation: MDA MB468 (ATCC HTB 132) and CHO HER2/HER3 cells were serum starved and treated as described above (MDA MB468 stimulation with 50 ng/ml HRG 1-β1 EGF domain; CHO HER2/HER3 cells stimulation with 100 ng/ml HRG1-β1 EGF domain). Cell lysates were tested in pHER3 ECLA (Table C-14).

[1143] Multivalent parental Nanobodies with Alb11 potently inhibited HRG1-β1 induced HER3 signaling in MCF-7 cells, as well as cells expressing HER2/HER3 (CHO HER2/HER3) and cells expressing EGFR/HER3 (MDA-MB468).

TABLE C-14
Inhibition of HRG induced HER3 phosphorylation by multivalent parental Nanobodies with Alb11 HLE

| | | | | | | MCF-7, | CHO HER2/HER3, | MDA468, |
|---|---|---|---|---|---|---|---|---|
| | | | | | | HRG1-β1 | HRG1-β1 | HRG1-β1 |
| construct | Nb1 | linker | Nb2 | linker | ALB11 | IC50 (M) | IC50 (M) | IC50 (M) |
| HER3MS00022 | 21F06 | 35GS | 21F06 | 9GS | ALB11 | 5.90E−11 | 1.84E−09 | 1.54E−10 |
| HER3MS00023 | 21F06 | 35GS | 34C07 | 9GS | ALB11 | 1.82E−10 | 7.06E−10 | 1.51E−11 |
| HER3MS00026 | 34C07 | 35GS | 21F06 | 9GS | ALB11 | 8.856E−10 | 2.163E−09 | 2.367E−10 |
| HER3MS00028 | 34C07 | 35GS | 4C07 | 9GS | ALB11 | 2.24E−09 | 2.06E−09 | 5.39E−10 |
| HER3MS00030 | 4C07 | 35GS | 21F06 | 9GS | ALB11 | 3.18E−10 | 4.50E−09 | 4.69E−10 |
| HER3MS00032 | 4C07 | 35GS | 4C07 | 9GS | ALB11 | 4.89E−10 | 4.78E−10 | 1.04E−10 |
| HER3MS00034 | 21F06 | 35GS | 18G11 | 9GS | ALB11 | 7.24E−10 | 1.29E−08 | 9.80E−10 |
| HER3MS00035 | 4C07 | 35GS | 18G11 | 9GS | ALB11 | 4.16E−10 | 6.88E−10 | 8.61E−11 |
| HER3MS00037 | 18G11 | 35GS | 18G11 | 9GS | ALB11 | 7.29E−09 | 5.95E−09 | 1.15E−09 |
| HER3MS00038 | 18G11 | 35GS | 21F06 | 9GS | ALB11 | 2.62E−10 | 3.63E−09 | 4.65E−10 |
| HER3MS00039 | 18G11 | 35GS | 4C07 | 9GS | ALB11 | 2.26E−09 | 2.40E−09 | 1.96E−10 |
| PHER3MS00051 | 34C07 | 35GS | 17B05 | 9GS | ALB11 | 1.401E−08 | n.d. | n.d. |
| PHER3MS00052 | 18G11 | 35GS | 17B05 | 9GS | ALB11 | 7.446E−09 | n.d. | n.d. |
| PHER3MS00054 | 17B05 | 35GS | 34C07 | 9GS | ALB11 | 2.673E−09 | n.d. | n.d. |
| PHER3MS00055 | 4C07 | 35GS | 17B05 | 9GS | ALB11 | 2.69E−09 | n.d. | n.d. |
| PHER3MS00056 | 17B05 | 35GS | 17B05 | 9GS | ALB11 | 2.579E−09 | n.d. | n.d. |
| PHER3MS00057 | 17B05 | 35GS | 4C07 | 9GS | ALB11 | 2.01E−09 | n.d. | n.d. |
| PHER3MS00058 | 17B05 | 35GS | 18G11 | 9GS | ALB11 | 4.434E−09 | n.d. | n.d. |
| PHER3MS00060 | 21F06 | 35GS | 17B05 | 9GS | ALB11 | 1.513E−09 | n.d. | n.d. |
| PHER3MS00061 | 17B05 | 35GS | 21F06 | 9GS | ALB11 | 3.041E−09 | n.d. | n.d. |
| PHER3MS00062 | 18G11 | 35GS | 3407 | 9GS | ALB11 | 1.124E−08 | n.d. | n.d. |
| PHER3MS00063 | 34C07 | 35GS | 18G11 | 9GS | ALB11 | 1.225E−08 | n.d. | n.d. |
| HER3MS00110 | 21F06 | 9GS | ALB11 | 9GS | 17B05 | 1.569E−09 | n.d. | n.d. |
| HER3MS00111 | 17B05 | 9GS | ALB11 | 9GS | 17B05 | 1.523E−09 | n.d. | n.d. |
| HER3MS00112 | 21F06 | 9GS | ALB11 | 9GS | 18G11 | 3.24E−10 | n.d. | n.d. |
| HER3MS00113 | 18G11 | 9GS | ALB11 | 9GS | 21F06 | 8.608E−10 | n.d. | n.d. |
| HER3MS00114 | 17B05 | 9GS | ALB11 | 9GS | 4C07 | 2.994E−09 | n.d. | n.d. |
| HER3MS00115 | 4C07 | 9GS | ALB11 | 9GS | 17B05 | 1.939E−09 | n.d. | n.d. |
| HER3MS00116 | 21F06 | 35GS | ALB11 | 35GS | 17B05 | 6.238E−10 | n.d. | n.d. |
| HER3MS00117 | 21F06 | 35GS | ALB11 | 35GS | 18G11 | 6.667E−10 | n.d. | n.d. |

n.d. = not determined

### Example 16

### Analysis of the EGFR-HER3 Heterodimerization Blocking Capacity of the Multivalent Parental Nanobodies with ALB11 HLE in Cellular Assays

[1144] Multivalent parental Nanobodies containing 17B05 as one building block, Alb11, and a second HER3 Nanobody (04C07, 18G11, 21F06, 34C07, or 17B05) were tested for their ability to block EGFR ligand induced Her3 phosphorylation. All 17B08 containing multivalent parental Nanobodies potently blocked TGFα induced pHER3 in CHO EGFR/HER3 cells as demonstrated for monovalent 17B05.

[1145] CHO EGFR/HER3 cells were serum starved and pre-incubated with Nanobodies or EGFR antibody cetuximab (serial dilutions, starting concentration 166.7 nM) in serum-free media for 60 min at 37° C., 5% CO₂. Cells were stimulated with 100 ng/ml rhTGFα (R&D Systems, #239-A) for 10 min, supernatants discarded and cells lysed in cold NP-40 lysis buffer (1% NP-40, 20 mM Tris, pH8.0, 137 mM NaCl, 10% glycerol, 2 mM EDTA, protease inhibitor cocktail set III (Calbiochem), phosphatase inhibitor cocktail set II (Calbiochem)). MA6000 96 well plates (MSD, # L15XB) were blocked with 3% block A (MSD) in PBS, pH7.4, 0.05% Tween20 and coated with HER3 specific capture antibody (R&D Systems, # MAB3481). Cell lysates were added and incubated for 2 h at room temperature (RT). Biotinylated anti-phospho Tyrosine antibody (R&D Systems, # BAM1676) and sulfo tag streptavidin reagent (MSD, #R32AD) were used for detection (Table C-15).

TABLE C-15
Inhibition of TGFα induced HER3 phosphorylation by
multivalent parental Nanobodies with Alb11 HLE and 17B05

| | | | | | | CHO EGFR/HER3, |
|---|---|---|---|---|---|---|
| | | | | | | TGFα |
| construct | Nb1 | linker | Nb2 | linker | ALB11 | IC50 (M) |
| PHER3MS00051 | 34C07 | 35GS | 17B05 | 9GS | ALB11 | 3.967^{E}−09 |
| PHER3MS00052 | 18G11 | 35GS | 17B05 | 9GS | ALB11 | 5.624^{E}−09 |
| PHER3MS00054 | 17B05 | 35GS | 34C07 | 9GS | ALB11 | 2.316^{E}−09 |
| PHER3MS00055 | 4C07 | 35GS | 17B05 | 9GS | ALB11 | 7.899^{E}−09 |
| PHER3MS00056 | 17B05 | 35GS | 17B05 | 9GS | ALB11 | 1.459^{E}−09 |
| PHER3MS00057 | 17B05 | 35GS | 4C07 | 9GS | ALB11 | 6.416^{E}−09 |
| PHER3MS00058 | 17B05 | 35GS | 18G11 | 9GS | ALB11 | 5.782^{E}−09 |
| PHER3MS00060 | 21F06 | 35GS | 17B05 | 9GS | ALB11 | 1.08^{E}−09 |
| PHER3MS00061 | 17B05 | 35GS | 21F06 | 9GS | ALB11 | 2.586^{E}−09 |
| HER3MS00110 | 21F06 | 9GS | ALB11 | 9GS | 17B05 | 1.41^{E}−09 |
| HER3MS00111 | 17B05 | 9GS | ALB11 | 9GS | 21F06 | 1.61^{E}−09 |
| HER3MS00114 | 17B05 | 9GS | ALB11 | 9GS | 04C07 | 3.332^{E}−09 |
| HER3MS00115 | 4C07 | 9GS | ALB11 | 9GS | 17B05 | 8.373^{E}−09 |
| HER3MS00116 | 21F06 | 35GS | ALB11 | 35GS | 17B05 | 1.772^{E}−09 |
| control Mab-1 | | | | | | <50% |

<50% = less than 50% inhibition

### Example 17

### Induction of HER3 Internalization by the Multivalent Parental Nanobodies with ALB11 HLE

[1146] The effect of HER3-specific Nanobodies on HER3 internalization was assessed using MCF-7 and MALME-3M cells. Cells were seeded in 6 well plates at a concentration of 10⁵ cells/ml and incubated in a cell incubator at 37° C. for 2 days. Then, 100 nM Nanobody was added with or without 5 μM HSA (Sigma, A8763) and cells were 2 h incubated at 4° C. or 37° C. Wells with control MAb1 and wells without any Nanobody or MAb were taken along as positive and negative controls respectively. After washing the cells, they were harvested and stained with anti-HER3 (R&D systems, #AF234) and donkey anti-goat-PE (Jackson ImmunoResearch Laboratories). The samples were measured using a FACS Array (Becton Dickinson) and the percentage internalization was determined by comparing the obtained signal of HER3 surface expression in 37° C. conditions with that in the negative control condition at 4° C. None of the monovalent Nanobodies was able to induce HER3 internalization, whereas bivalent 17B05 induced 17.8% internalization. Bivalent 18G11, 34C07, 4C07 and 21F06 induced 60-70% internalization, which is slightly higher than the positive control MAb1 (57% internalization). Induction of HER3 internalization by biparatopic constructs was dependent on their respective compositions. No internalization was observed when 21F06 was present in the construct. In constructs without 21F06, internalization (40-70%) was only observed when 17B05 or 04C07 was located at the N-terminal position. Identical results were obtained in both cell lines.

### Example 18

### Sequence Optimization

[1147] Nanobodies 4C07, 17B05, 21F06, 18G11 and 34C07 were taken further for sequence optimization. This is a process in which parental Nanobody sequences are mutated to yield Nanobody sequences that are more identical to human VH3-JH germline consensus sequences. Specific amino acids, with the exception of the so-called hallmark residues, in the FRs that differ between the Nanobody and the human VH3-JH germline consensus are altered to the human counterpart in such a way that the protein structure, activity and stability are kept intact. The parental Nanobody amino acid sequence is also aligned to the llama IGHV germline amino acid sequence of the Nanobody (identified as the top hit from a BlastP analysis of the Nanobody against the llama IGHV germlines), and in certain cases mutations towards the llama germline are introduced to increase the stability of the Nanobody, which is defined as llamanisation. In addition potential sites for Post Translational Modifications (PTMs as deamidation, isomerisation, methionine oxidation) are changed to guarantee chemical stability. The analysis occurred in two rounds, in a first round single mutations and combined mutations upon the basic variants were evaluated. Based upon these results, acceptable substitutions are combined in second round variants which are further characterized.

[1148] Six amino acid residues in 04C07 can be substituted for humanization purposes. In the sequence optimization process, four 04C07 versions (a basic version and 3 additional variants) were constructed. The basic variant (HER3MS0042) contains 4 substitutions: A14P, A74S, K83R and Q108L. In addition to these changes, the A46E and L93A substitutions were introduced and investigated in additional variants. The constructs were expressed in E. coli and purified by IMAC and desalting.

[1149] The purified molecules were evaluated for their HRG blocking capacity using alphascreen. Also thermal stability of the variants was tested in a thermal shift assay using the Lightcycler (Roche). In this assay the Nanobody variants are incubated at different pH's in the presence of sypro orange and a temperature gradient is applied. When the Nanobodies start denaturating, sypro orange binds and the measured fluorescence increases suddenly. A melting temperature can be determined for a certain pH. Results are summarized in C-16.

TABLE C-16
results of the first round sequence optimization variants of 04C07

| | | IC50 HRG | Tm at |
|---|---|---|---|
| | | competition | pH 7 |
| ID | Mutation(s) | alphascreen (M) | (° C.) |
| HER3MS04C07 | parental | 2.7E−10-6.9E−10 | 58.55 |
| HER3MS0042 | A14P, A74S, K83R, | 3.1E−10 | 60.3 |
| (basic) | Q108L | | |
| HER3MS0043 | basic + A46E | 1.02E−9 | 66.5 |
| HER3MS0044 | basic + L93A | 1.00E−9 | 62 |
| HER3MS0045 | basic + A46E + L93A | 4.91E−9 | 66.9 |

[1150] The basic variant had a similar potency in the HRG blocking alphascreen as the parental 04C07 Nanobody, meaning that the mutations on positions 14, 74, 84 and 108 were accepted. A 3- to 4-fold lower potency was observed in variants HER3MS0043 (A46E) and HER3MS0044 (L93A), which increases to a 18-fold potency drop if they were combined. All variants had a positive influence on stability as higher Tm values were obtained than for the parental 04C07 Nanobody. Analysis of post translational modification sites indicated deamidation at position N101 (22-29% deamidation after 4 weeks storage at 40° C. and 9-14% deamidation after 3 days storage at pH9 and 25° C.). A library of N101X was made, transfected in E. coli and Nanobody containing periplasmic lysates were tested for their HRG blocking capacity in a competition FMAT as well as for their off rate on recombinant HER3. All tested variants gave 99-100% blocking and a 2-3 fold higher off rate compared to the parental 04C07 Nanobody. The variants N101G and N101S were selected for further characterization. Pyroglutamate formation was 6.6% after 4 weeks storage at 40° C., which was acceptable and did not require an amino acid substitution at position 1. Four variants were made in the second round sequence optimization. They were combinations of the basic variant with substitutions A46E, N101G or N101S (Table C-17). Introduction of the substitution A46E resulted in a significant potency drop in the HRG competition alphascreen and pHER3 blocking assay in MCF7 cells but on the other hand increased stability as a Tm increase of 4.5° C. was observed. These results were in agreement with first round sequence optimization results. Mutation of N101 to G or S gave a 5- to 6-fold potency drop and a decrease in Tm of 1.5-2° C. Variants HER3MS00129 and HER3MS00130 were selected for further characterization as formatting could mask their lower potency in a monovalent format. The percentage framework identity in the framework region for HER3MS00129 is 95.5% and for HER3MS00130 94.4%, based on the AbM definition.

TABLE C-17
results of the second round sequence
optimization variants of 04C07

| | | IC50 HRG | IC50 pHER3 | |
|---|---|---|---|---|
| | | competition | HRG1-β1 | TM |
| | | alphascreen | stimulated | pH 7 |
| ID | Mutations | (M) | MCF7 (M) | (° C.) |
| HER3MS04C07 | parental | 1.8E−10 | 6.25E−09 | 58.55 |
| HER3MS0042 | A14P, A74S, | 3.1E−10 | 6.805E−9 | 60.3 |
| (basic) | K83R, Q108L | | | |
| HER3MS00129 | basic + A46E + | 5.1E−9 | 1.21E−07 | 63.1 |
| | N101G | | | |
| HER3MS00130 | basic + N101G | 8.8E−10 | 9.38E−09 | 56.5 |
| HER3MS00131 | basic + A46E + | 5.8E−9 | 2.26E−07 | 63.5 |
| | N101S | | | |
| HER3MS00132 | basic + N101S | 1.0E−9 | 1.31E−08 | 56.9 |

[1151] Five amino acid residues in 21F06 can be substituted for humanization/llamanization purposes and five amino acid substitutions can be analysed for chemical stability purposes. In the sequence optimization process, four 21F06 versions (a basic version and 3 additional variants) were constructed. The basic variant (HER3MS0046) contains 4 substitutions: A14P, A74S, K83R and Q108L. In addition to these changes, the G40A and D44E substitutions were introduced and investigated in additional variants. The constructs were expressed in E. coli and purified by IMAC and desalting. The purified molecules were evaluated for their HRG blocking capacity using alphascreen. Also thermal stability of the variants was tested in a thermal shift assay using sypro orange and applying a temperature gradient. When the Nanobodies start denaturating, sypro orange binds and the measured fluorescence increases suddenly. A melting temperature can be determined for a certain pH. Results are summarized in Table C-18.

TABLE C-18
Results of 21F06 humanization variants in
the first round sequence optimization

| | | IC50 HRG | IC50 pHER3 | |
|---|---|---|---|---|
| | | competition | HRG1-β1 | Tm at |
| | | alphascreen | stimulated | pH 7 |
| ID | Mutations | (M) | MCF7 (M) | (° C.) |
| HER3MS21F06 | parental | 2.5E−10 | 8.74E−9 | 67.3 |
| HER3MS0046 | A14P, A74S, | 2.8E−10 | NA | 67.4 |
| basic | K83R, Q108L | | | |
| HER3MS0047 | basic + G40A | 2.1E−10 | NA | 71.1 |
| HER3MS0048 | basic + D44E | 2.7E−10 | NA | 67.8 |
| HER3MS0049 | basic + G40A + | 2.5E−10 | 2.79E−9 | 70.6 |
| | D44E | | | |

[1152] All tested variants had a similar potency in the HRG blocking alphascreen as the parental 21F06 Nanobody, meaning that the mutations on positions 14, 40, 44, 74, 84 and 108 were accepted. The G40A substitution resulted in an increased Tm value, suggesting that it had a positive effect on the stability of the Nanbody. To deal with 2 potential isomerisation sites and one Met oxidation site, libraries were made where the amino acids D54, G55, M100b, D101 and S102 were randomized. The libraries were transformed in TG1 and individual colonies were picked and grown in 96-well plates. Periplasmic extracts were prepared, sequenced and screened. All tested variants as well as 21F06 parental gave complete block in a HRG competition FMAT experiment and off rate analysis also could not discriminate between these variants and 21F06 parental (6.2E-4-8.3E-4). Some variants were selected (based on similar characteristics of original and substituted amino acid) to purify and test for their thermal stability. Results are shown in C-19.

TABLE C-19
Tm results of 21F06 chemical stability variants
in the first round sequence optimization

| ID | Mutations | Tm at pH 7 (° C.) |
|---|---|---|
| HER3MS21F06 | Parental (P) | 64 |
| HER3MS00088 | P + D54Y − Q108L | 60.7/61.06 |
| HER3MS00089 | P + D54E − Q108L | 61.1/61.9 |
| HER3MS00090 | P + G55A − Q108L | 54.8 |
| HER3MS00091 | P + M100bF − Q108L | 56.1/56.8 |
| HER3MS00092 | P + M100bY − Q108L | 56.9/57.3 |
| HER3MS00093 | P + M100bL − Q108L | 60.7 |
| HER3MS00094 | P + D101Q − Q108L | 62.3 |
| HER3MS00095 | P + D101E − Q108L | 60.3/60.7 |
| HER3MS00096 | P + S102D − Q108L | 50.3 |
| HER3MS00097 | P + S102E − Q108L | 55.7 |
| HER3MS00098 | P + S102T − Q108L | 65.2 |

[1153] Analysis of post translational modification sites indicated 14% pyroglutamate after 4 weeks storage at 40° C. and no substitution was introduced at position 1. Thirteen percent of the mono-oxidized material was observed after 3 h treatment with 10 mM H2O₂ at room temperature. Substitution of M100b was required and mutation M100bL was selected based on screening data and physical similarity between M and L. Storage of parental 21F06 under forced deamidation conditions (4 weeks at 40° C. or 3 days at pH9 and 25° C.) induced 20% deamidation at position N73. However, the percentage deamidation was only 3.2 after 3 weeks storage at 25° C. Analysis of a 21F06 variant containing the basic mutation A74S showed a slightly higher percentage of deamidation: 37.1% after storage in forced deamidation conditions (3 days at pH9 and 25° C.) and 4.9% after 3 weeks storage at 25° C. It was concluded to keep A74S for further characterization in a second round of sequence optimization as this increased the percentage of framework identity compared to human antibodies and deamidation could be kept under control during DSP/USP since only a deamidated fraction of <5% was observed in the 25° C. conditions. Finally, 12.9% deamidation was observed of D54 and mutation D54E was selected based on screening data and physical similarity between D and E.

[1154] The second round 21F06 sequence optimization variant HER3MS00122 was made which combined the substitutions A14P, G40A, D44E, A74S, K83R and Q108L. This variant and parental 21F06 gave a similar IC50 in a HRG alphascreen competition assay as well as in the pHER3 blocking assay using MCF7 cells and showed an identical Tm value. 21F06 variant HER3MS00122 has 91% framework identity in the framework region according to the AbM definition.

[1155] Based on these results, HER3MS00122 was selected as the final sequence optimized 21F06 Nanobody.

[1156] Five amino acid residues in 18G11 can be substituted for humanization purposes and four amino acid substitutions can be analysed for chemical stability purposes. In this case the basic variant was made, containing mutations K₈₃R and Q108L. Then, a mini-library of the basic variant with 2⁶=64 permutations at positions 44, 61, 64, 74, 75 and 77 was constructed. Mutation H93A was not investigated since this mutation is close to CDR3 which increased the chance that humanization would affect the potency of the Nanobody.

[1157] The libraries were transformed in TG1 and individual colonies were picked and grown in 96 well plates. Periplasmic extracts were prepared, sequenced and screened for competition with biotinylated parental 18G11 to bind recombinant HER3-Fc. The parental 18G11 Nanobody and its basic variant HER3MS0050 showed identical potency in alphascreen (IC50 3.2E-9 M) and an identical Tm of 72° C. The substitution W75K was not tolerated as a total loss in HER3 binding was observed. Thirty three unique competitors were tested for off rate on recombinant HER3-ECD. Most clones were within a 2-fold higher k_{d} range compared to parental 18G11 (k_{d} 6.2-7.7E-4 s⁻¹), only three variants showed a 2-3 fold higher off rate. The results suggested that substitutions E64K, T74S, A77T, K83R, Q108L had no effect on the potency or stability of 18G11, whereas a 28% reduction in potency was observed in presence of substitution R44Q. However, the R44Q substitution increased the Tm values with around 4° C. suggesting that the stability of the molecules improved.

[1158] Analysis of post translational modification sites revealed 12.3% pyroglutamate formation at position 1 after 4 weeks storage at 40° C. but this level did not require substitution of E1. No isomerization variants at position 95 could be detected after 4 weeks storage at 40° C. and significant oxidation was only observed at amino acids M99 and M102 (30-40% mono-oxidized variant after forced oxidation using 10 mM H₂O₂ during 3 h at room temperature). Two substitution libraries were made to deal with these Met oxidation sites (M99X and M102X). The libraries were transformed in TG1 and individual colonies were picked and grown in 96 well plates. Periplasmic extracts were prepared, sequenced and screened for competition with biotinylated parental 18G11 to bind recombinant HER3-Fc. Subsequently, 18 unique competitors were tested in off rate screening on recombinant HER3-ECD. Sixteen clones showed identical k_{d} values as parental 18G11 (6.10E-4 s−1). Seven variants were selected for purification and further characterization for their capacity to block pHER3 signaling in MCF7 cells and their stability using the thermal shift assay. The results are shown in Table C-20. The substitutions M99L and M102L were selected to test in a second round sequence optimization based on potency, stability and similar physical properties of leucine and methionine.

TABLE C-20
Results of 18G11 variants in the first round sequence optimization

| | | Nanobody tested as peri | | purified Nanobody tested | |
|---|---|---|---|---|---|
| | | 18G11 | | IC50 pHER3 | |
| | | competition | | blocking HRG | Tm at |
| | | alphascreen | Off rate | stimulated | pH 7 |
| ID | mutation | (% inhibition) | (s⁻¹) | MCF7 (M) | (° C.) |
| 18G11 | parental | 91-93.6% | 6.2-7.7E−4 | 2.912E−8 | 69.9 |
| HER3MS00069 | M99L | 83% | 8.1E−4 | 5.27E−8 | 71.88 |
| HER3MS00070 | M99I | 82.2% | 6.4E−4 | 3.778E−8 | 71.06 |
| HER3MS00071 | M99V | 80.9% | 8.4E−4 | 7.346E−8 | 71.06 |
| HER3MS00068 | M99G | 84.4% | 1.0E−3 | 8.881E−8 | 70.64 |
| HER3MS00072 | M102L | 88.0% | 8.2E−4 | 5.764E−8 | 70.63 |
| HER3MS00073 | M102D | 84.4% | 8.3E−4 | 8.747E−8 | 62.73 |
| HER3MS00074 | M102E | 82.7% | 4.9E−4 | 6.304E−8 | 66.1 |

In the second round 18G11 sequence optimization, two variants were made which combined the selected substitutions for humanization and chemical stability purposes. The only difference between both variants was the presence/absence of R44Q. Both variants showed an increase of around 6° C. in Tm value compared to the parental Nanobody (Table C-21). Finally, the 18G11 variant HER3MS00211 was selected as absence of the R44Q mutation resulted in a slightly better potency. The obtained percentage framework identity in the framework region was 87.6 according to the AbM definition (see Antibody Engineering, Vol 2 by Kontermann & Diibel (Eds), Springer Verlag Heidelberg Berlin, 2010).

TABLE C-21
Results of 18G11 variants in the second round sequence optimization

| | | | | IC50 pHER3 | |
|---|---|---|---|---|---|
| | | IC50 18G11 | | blocking HRG | Tm at |
| | | competition | | stimulated | pH |
| ID | Mutations | alphascreen (M) | Off-rate (s⁻¹) | MCF7 (M) | (° C.) |
| HER3MS18G11 | — | 4.4E−09 | 4.3E−4-4.7E−4 | 1.09E−8-4.61E−8 | 69.9 |
| parental | | | | | |
| HER3MS00125 | R44Q, S62D, E64K, T74S, | 1.4E−08 | 1.2E−03 | | 76.0 |
| | A77T, K83R, M99L, M102L | | | | |
| | and Q108L | | | | |
| HER3MS00211 | E64K, T74S, A77T, M99L, | 5.4E−09 | 7.2E−04 | 1.79E−8-2.0E−8 | 75.6 |
| | K83R, M102L and Q108L | | | | |

[1159] Seven amino acid residues in 34C07 can be substituted for humanization purposes. In this case the basic variant was made, containing mutations K83R and Q108L. Then, a mini-library of the basic variant with 7 additional unique mutations spread over 6 variable positions (2⁵×3=96 permutations) was constructed. Mutation H93A was not investigated since this mutation is close to CDR3 which increased the chance that humanization would affect the potency of the Nanobody. The libraries were transformed in TG1 and individual colonies were picked and grown in 96 well plates. Periplasmic extracts were prepared, sequenced and screened for competition with biotinylated parental 34C07 to bind recombinant HER3-Fc. Twelve unique competitors were tested for off rate on recombinant HER3-ECD. Most clones were within a 2-fold higher k_{d} range compared to parental 34C07 (k_{d} 3.7E-4-3.9E-4 s⁻¹). The mutation W75K showed less than 40% inhibition in the 34C07 competition alphascreen and a 95-fold increase in off rate compared to parental 34C07. The substitutions G19R, V23A, V71R, A74S, V84P and V84A did not affect binding to HER3.

[1160] Analysis of post translational modification sites revealed 42% pyroglutamate formation after 4 weeks storage at 40° C. Therefore, the effect of the substitution E1D on the Nanobody potency was analysed in the second round sequence optimization. No oxidation (10 mM H₂O₂ during 3 h at room temperature), deamidation (4 weeks at 40° C.) or Asp isomerization (4 weeks at 40° C.) were identified so there was no need to substitute additional amino acids for chemical stability purposes.

[1161] Four constructs were made in the second round sequence optimization. They all contained the substitutions G19R, V23A, V71R, A74S, K83R and Q108L but were different for E1D, V84A and V84P (Table C-22). The constructs were expressed in E. coli and purified by IMAC and desalting. The purified molecules were characterized using the 34C07 competition alphascreen, off rate analysis on HER3-ECD and pHER3 blocking assay in HRG stimulated MCF7 cells. Results are summarized in Table C-22.

TABLE C-22
Results of 34C07 variants in the second round sequence optimization

| | | IC50 34C07 | | IC50 pHER3 | |
|---|---|---|---|---|---|
| | | competition | | blocking | |
| ID | Mutations | alphascreen (M) | Off-rate (s⁻¹) | MCF7 (M) | Tm (° C.) |
| HER3MS34C07 | — | 5.5E−9 | 3.0E−4-3.1E−4 | 2.49E−8 | 73.9 |
| parental | | | | | |
| HER3MS00123 | K83R + Q108L + G19R + | 7.6E−9 | 4.6E−4 | 3.09E−8 | 76.4 |
| | V23A + V71R + A74S + | | | | |
| | V84P | | | | |
| HER3MS00124 | K83R + Q108L + G19R + | 7.1E−9 | 4.5E−4 | 3.05E−8 | 76.2 |
| | V23A + V71R + A74S + | | | | |
| | V84A | | | | |
| HER3MS00127 | K83R + Q108L + E1D + | 8.5E−9 | 4.6E−4 | 3.88E−8 | 75.6 |
| | G19R + V23A + V71R + | | | | |
| | A74S + V84P | | | | |
| HER3MS00128 | K83R + Q108L + E1D + | 6.7E−9 | 4.6E−4 | 4.05E−8 | 75.2 |
| | G19R + V23A + V71R + | | | | |
| | A74S + V84A | | | | |

[1162] It was confirmed that the investigated substitutions did not influence the binding significantly. In addition, pHER3 blocking, off rate and Tm were similar for all tested variants and the parental 34C07 Nanobody. The final variant became HER3MS00123 and HER3MS00127 (containing the E1D mutation in case the Nanobody is N-terminally located in the multivalent construct). The percentage framework identity in the framework regions for HER3MS00123 is 89.9% and for HER3MS00127 is 88.8% based on the AbM definition.

[1163] Six amino acid residues in 17B05 can be substituted for humanization purposes and two amino acid substitutions can be analysed for chemical stability purposes. In this case the basic variant was made, containing mutations A74S, K83R and Q108L. Then, nine constructs were made containing the basic mutations and combinations of the three additional mutations which were investigated (173N, F79Y and R93A).

[1164] The constructs were expressed in E. coli and purified by IMAC and desalting. The purified molecules were tested for their capacity to block HRG binding to HER3-Fc using alphascreen, off rate on HER3-ECD and stability using the thermal shift assay. Results are summarized in C-23.

TABLE C-23
Results of 17B05 variants in the first round sequence optimization

| | | IC50 HRG | | |
|---|---|---|---|---|
| | | competition | | Tm at pH 7 |
| ID | Mutations | alphascreen (M) | Off-rate (s⁻¹) | (° C.) |
| HER3MS17B05 | — | 3.4E−10-9.3E−10 | 1.8E−4-2.0E−4 | 69.8 |
| parental | | | | |
| HER3MS0076 | A74S + N83R + | 7.88E−10 | 1.7E−4 | 73.6 |
| basic variant | Q108L | | | |
| HER3MS0077 | A74S + N83R + | 7.53E−10 | NA | 72.3 |
| | Q108L + I73N | | | |
| HER3MS0078 | A74S + N83R + | 8.11E−10 | NA | 74.4 |
| | Q108L + F79Y | | | |
| HER3MS0079 | A74S + N83R + | 3.08E−09 | NA | 71.5 |
| | Q108L + R93A | | | |
| HER3MS0080 | A74S + N83R + | 7.31E−10 | 1.8E−4 | 73.6 |
| | Q108L + I73N + | | | |
| | F79Y | | | |
| HER3MS0081 | A74S + N83R + | 5.89E−09 | NA | 69.4 |
| | Q108L + I73N + | | | |
| | R93A | | | |
| HER3MS0082 | A74S + N83R + | 4.05E−09 | NA | 73.2 |
| | Q108L + F79Y + | | | |
| | R93A | | | |
| HER3MS0083 | A74S + N83R + | 4.95E−09 | 8.4E−4 | 71.1 |
| | Q108L + I73N + | | | |
| | F79Y + R93A | | | |
| HER3MS0084 | A74S + N83R + | 9.4E−10 | 1.8E−4 | NA |
| | Q108L +S84P | | | |
| HER3MS0085 | A74S + N83R + | 7.6E−10-9.4E−10 | 1.9E−4 | 74.8 |
| | Q108L + S84A | | | |

[1165] At least a 9-fold reduction in potency was observed in the HRG blocking alphascreen when substitution R93A was introduced in the construct, whereas other substitutions resulted in a similar IC50 compared to parental 17B05. This observation was confirmed by the off rate data. Most mutations also had a small positive effect in Tm value.

[1166] Analysis of post translational modification sites revealed 25% pyroglutamate formation after 4 weeks storage at 40° C. Therefore, the effect of the substitution E1D on the Nanobody potency was analysed in the second round sequence optimization. No oxidation (10 mM H₂O₂ during 3 h at room temperature) or Asn deamidation (4 weeks at 40° C.) were identified so there was no need to substitute additional amino acids for chemical stability purposes.

[1167] Four constructs were made in the second round sequence optimization. They all contained the substitutions 173N, F79Y, A74S, K83R and Q108L but were different for E1D, S84A and S84P (Table C-24). The constructs were expressed in E. coli and purified by IMAC and desalting. The purified molecules were characterized using the HRG competition alphascreen on HER3-Fc, off rate analysis on HER3-ECD and pHER3 blocking assay in MCF7 cells. Results are summarized in Table C-24.

TABLE C-24
Results 17B05 variants in the second round sequence optimization

| | | | | IC50 pHER3 | |
|---|---|---|---|---|---|
| | | | | blocking HRG | |
| | | HRG competition | Off-rate | stimulated | Tm at pH 7 |
| ID | Mutations | alphascreen (M) | (s⁻¹) | MCF7 (M) | (° C.) |
| HER3MS17B05 | parental | 7.8E−10 | 1.8E−4-2.0E−4 | 4.52E−9 | 69.8 |
| HER3MS0118 | A74S + N83R + Q108L + | 6.0E−10 | 1.8E−4 | 2.69E−9 | 74.4 |
| | I73N + F79Y + S84A + R93A | | | | |
| HER3MS0119 | A74S + N83R + Q108L + | 7.9E−10 | 1.8E−4 | 1.70E−9 | 76.9 |
| | I73N + F79Y + S84P + R93A | | | | |
| HER3MS0120 | A74S + N83R + Q108L + | 7.5E−10 | 1.9E−4 | 4.28E−9 | 73.9 |
| | E1D + I73N + F79Y + | | | | |
| | S84A + R93A | | | | |
| HER3MS0121 | A74S + N83R + Q108L + | 5.5E−10 | 1.8E−4 | 3.53E−9 | 76.4 |
| | E1D + I73N + F79Y + | | | | |
| | S84P + R93A | | | | |

[1168] It was confirmed that the investigated substitutions did not influence the binding and HRG competition significantly. In addition, IC50s for pHER3 blocking were similar for all tested variants and the parental 17B05 Nanobody. Introduction of S84P had a positive effect on Tm. The final variant became HER3MS00119 and HER3MS00121 (containing the E1D mutation in case the Nanobody is N-terminally located in the multivalent construct). The percentage framework identity in the framework regions for HER3MS00119 is 89.9% and for HER3MS00121 is 88.8% based on the AbM definition.

### Example 19

### Generation and Expression Level Analysis of the Multivalent Sequence Optimized HER3-Specific Nanobodies with HLE

[1169] Combinations were made of sequence optimized Nanobodies blocking HRG binding to HER3 (21F06, 04C07 and 17B05), a Nanobody blocking HER3 heterodimerization (17B05) and a Nanobody binding to domain II of HER3 (18G11). The ALB half life extension was located in the middle (Nb1-ALB-Nb2) or at the C-terminal position (Nb1-Nb2-ALB). The different building blocks were connected with two 9GS linkers or two 35GS linkers. The constructs were produced in Pichia pastoris as tagless proteins and purified via MEP hypercell or Protein A affinity chromatography, followed by desalting. A copy number screen was performed and expression yields were predicted for the clones with the highest copy number based on small scale cultures (Table C-25). Little impact of position of Nanobody building blocks and linker length on predicted yields was observed.

TABLE C-25
Results of expression level analysis of purified multivalent sequence
optimized anti-HER3 Nanobodies with ALB11 HLE

| | | | | | | Predicted |
|---|---|---|---|---|---|---|
| | | | | | | yield in |
| | | | Nb2 or | | Nb2 or | fermentor |
| ID | Nb1 | linker | HLE | linker | HLE | (g/l) |
| HER3MS00135 | 17B05 SO | 9GS | ALB11 | 9GS | 21F06 SO | 1.5 |
| HER3MS00136 | 17B05 SO | 35GS | ALB11 | 35GS | 21F06 SO | >1 |
| HER3MS00137 | 17B05 SO | 9GS | 21F06 SO | 9GS | ALB11 | 1.5 |
| HER3MS00138 | 17B05 SO | 35GS | 21F06 SO | 35GS | ALB11 | 0.5-1 |
| HER3MS00139 | 17B05 SO | 9GS | ALB11 | 9GS | 34C07 SO | 1.5 |
| HER3MS00140 | 17B05 SO | 35GS | ALB11 | 35GS | 34C07 SO | >1 |
| HER3MS00141 | 17B05 SO | 9GS | 34C07 SO | 9GS | ALB11 | 1.5 |
| HER3MS00142 | 17B05 SO | 35GS | 34C07 SO | 35GS | ALB11 | >1 |
| HER3MS00143 | 17B05 SO | 9GS | ALB11 | 9GS | 18G11 SO | 1.5 |
| HER3MS00144 | 17B05 SO | 35GS | ALB11 | 35GS | 18G11 SO | 0.5-1 |
| HER3MS00145 | 17B05 SO | 9GS | 18G11 SO | 9GS | ALB11 | 1.5 |
| HER3MS00146 | 17B05 SO | 35GS | 18G11 SO | 35GS | ALB11 | 0.5-1 |
| HER3MS00209 | 17B05 SO | 9GS | ALB11 | NA | NA | 1.5 |
| HER3MS00212 | 17B05 SO | 9GS | ALB11 | 9GS | 18G11 SO | 1 |
| HER3MS00159 | 18G11 SO | 35GS | ALB11 | 35GS | 04C07 SO | 1.5 |
| HER3MS00160 | 18G11 SO | 35GS | ALB11 | 35GS | 04C07 SO | 0.5 |
| HER3MS00161 | 18G11 SO | 35GS | 04C07 SO | 35GS | ALB11 | >1 |
| HER3MS00162 | 18G11 SO | 35GS | 04C07 SO | 35GS | ALB11 | >1 |
| HER3MS00199 | 18G11 SO | 9GS | ALB11 | 9GS | 21F06 SO | 0.5-1 |
| HER3MS00200 | 18G11 SO | 9GS | 21F06 SO | 9GS | ALB11 | 0.5-1 |
| HER3MS00207 | 18G11 SO | 9GS | ALB11 | 9GS | 17B05 SO | 0.5-1 |
| HER3MS00215 | 18G11 SO | 9GS | ALB11 | 9GS | 17B05 SO | 0.5-1 |
| HER3MS00201 | 21F06 SO | 9GS | ALB11 | 9GS | 18G11 SO | 0.5-1 |
| HER3MS00202 | 21F06 SO | 9GS | 18G11 SO | 9GS | ALB11 | 0.5-1 |
| HER3MS00210 | 21F06 SO | 9GS | ALB11 | 9GS | 18G11 SO | 0.5 |
| HER3MS00214 | 21F06 SO | 9GS | ALB11 | 9GS | 18G11 SO | 0.5 |
| HER3MS00152 | 34C07 SO | 35GS | ALB11 | 35GS | 04C07 SO | 0.5-1 |
| HER3MS00153 | 34C07 SO | 35GS | 04C07 SO | 35GS | ALB11 | 0.5-1 |
| HER3MS00154 | 34C07 SO | 35GS | 04C07 SO | 35GS | ALB11 | 0.5-1 |
| HER3MS00147 | 04C07 SO | 35GS | ALB11 | 35GS | 34C07 SO | 1.5 |
| HER3MS00149 | 04C07 SO | 35GS | 34C07 SO | 35GS | ALB11 | >1 |
| HER3MS00155 | 04C07 SO | 35GS | ALB11 | 35GS | 18G11 SO | 1.5 |
| HER3MS00157 | 04C07 SO | 35GS | 18G11 SO | 35GS | ALB11 | >1 |
| HER3MS00208 | 04C07 SO | 9GS | ALB11 | 9GS | 18G11 SO | 0.5 |
| HER3MS00213 | 04C07 SO | 9GS | ALB11 | 9GS | 18G11 SO | 0.5-1 |
| HER3MS00148 | 04C07 SO | 35GS | ALB11 | 35GS | 34C07 SO | 0.5-1 |
| HER3MS00150 | 04C07 SO | 35GS | 34C07 SO | 35GS | ALB11 | 0.5-1 |
| HER3MS00151 | 04C07 SO | 35GS | ALB11 | 35GS | 34C07 SO | 0.5-1 |
| HER3MS00156 | 04C07 SO | 35GS | ALB11 | 35GS | 18G11 SO | 0.5-1 |
| HER3MS00158 | 04C07 SO | 35GS | 18G11 SO | 35GS | ALB11 | 0.5-1 |

### Example 20

### Induction of HER3 Internalization by the Multivalent Sequence Optimized Nanobodies with ALB 11 HLE

[1170] The effect of HER3-specific multivalent sequence optimized Nanobodies with HLE on HER3 internalization was assessed using MCF-7 and MALME-3M cells as described in the previous examples. No internalization was observed when 21F06 was present in a multivalent construct. In constructs without 21F06, internalization (36-71%) was only observed when 17B05 or 04C07 was present in the N-terminal position. The results (Table C-26) were identical in both cell lines. The construct HER3MS00209 consists of sequence optimized 17B05 linked to ALB11 and did not show internalization. These results were similar to those obtained with the parental multivalent constructs and indicated that the selected multivalent panel contained molecules with different mode of actions. Two control antibodies were also tested in the internalization assay and they induced both internalization of HER3.

TABLE C-26
Percentage HER3 internalization induced by multivalent sequence
optimized Nanobodies or control MAbs on MCF7 and MALME-3M cells.

| | | | | | | % HER3 | % HER3 |
|---|---|---|---|---|---|---|---|
| | | | Nb2 or | | | internalization MCF7 | internalization |
| ID | Nb1 | linker | HLE | linker | Nb2 or HLE | cells | MALME-3M cells |
| HER3MS00135 | 17B05 SO | 9GS | ALB11 | 9GS | 21F06 SO | 0 | 0 |
| HER3MS00137 | 17B05 SO | 9GS | 21F06 SO | 9GS | ALB11 | 5 | NA |
| HER3MS00143 | 17B05 SO | 9GS | ALB11 | 9GS | 18G11 SO | 62-67 | NA |
| HER3MS00207 | 18G11 SO | 9GS | ALB11 | 9GS | 17B05 SO | 4 | 9 |
| HER3MS00208 | 4C07 SO | 9GS | ALB11 | 9GS | 18G11 SO | 36.0 | 40.2 |
| HER3MS00209 | 17B05 SO | 9GS | ALB11 | NA | NA | 0-7 | 0-4 |
| HER3MS00210 | 21F06 SO | 9GS | ALB11 | 9GS | 18G11 SO | 0 | 0 |
| HER3MS00212 | 17B05 SO | 9GS | ALB11 | 9GS | 18G11 SO | 65-71 | 64-70 |
| HER3MS00213 | 4C07 SO | 9GS | ALB11 | 9GS | 18G11 SO | 48-53 | 53 |
| HER3MS00214 | 21F06 SO | 9GS | ALB11 | 9GS | 18G11 SO | 0 | 0 |
| HER3MS00215 | 18G11 SO | 9GS | ALB11 | 9GS | 17B05 SO | 0-1 | 0-6 |
| Control MAb1 | NA | NA | NA | NA | NA | 51-60 | 53-69 |
| Control MAb2 | NA | NA | NA | NA | NA | 49-61 | 50-63 |

### Example 21

### Inhibition of the HRG Induced pHER3 and Downstream Signaling by Multivalent Sequence Optimized Nanobodies with ALB11 HLE in Cellular Assays

[1171] To determine the potency of multivalent sequence optimized Nanobodies in inhibiting ligand induced HER3 phosphorylation and EGFR/HER3 and HER2/HER3 transphosphorylation, Nanobodies were tested in cell based assays as described below.

[1172] Inhibition of ligand induced pHER3 (phosphoHER3) in MCF-7 cells (cell based electrochemiluminescence assay (ECLA)): MCF-7 cells (ATCC HTB 22) were serum starved and pre-incubated with Nanobodies (serial dilutions, starting concentration 666 nM or 167 nM) in serum-free media for 60 min at 37° C., 5% CO₂. Cells were stimulated with 50 ng/ml HRG1-β1 EGF domain (R&D Systems, #396-HB) for 10 min, supernatants discarded and cells lysed in cold NP-40 lysis buffer (1% NP-40, 20 mM Tris, pH8.0, 137 mM NaCl, 10% glycerol, 2 mM EDTA, protease inhibitor cocktail set III (Calbiochem), phosphatase inhibitor cocktail set II (Calbiochem)). MA6000 96 well plates (MSD, # L15XB) were blocked with 3% block A (MSD) in PBS, pH7.4, 0.05% Tween20 and coated with HER3 specific capture antibody (R&D Systems, # MAB3481). Cell lysates were added and incubated for 2 h at room temperature (RT). Biotinylated anti-phospho Tyrosine antibody (R&D Systems, # BAM1676) and sulfo tag streptavidin reagent (MSD, #R32AD) were used for detection (Table C-27).

### 21.1 Inhibition of EGFR/HER3 and HER2/HER3 Transphosphorylation:

[1173] MDA MB468 (ATCC HTB 132) and CHO HER2/HER3 cells were serum starved and treated as described above (MDA MB468 stimulation with 50 ng/ml HRG1-β1 EGF domain; CHO HER2/HER3 cells stimulation with 100 ng/ml HRG1-β1 EGF domain). Cell lysates were tested in pHER3ECLA (Table C-27).

[1174] Multivalent sequence optimized Nanobodies with Alb11 potently inhibited HRG induced HER3 signaling in MCF-7 cells, as well as cells expressing HER2/HER3 (CHO HER2/HER3) or cells expressing EGFR/HER3 (MDA-MB468). In addition downstream signaling was potently inhibited. Alb11 did not abolish potency in the formats tested.

21.2 Inhibition of Downstream Signaling (pAkt/pERK1/2):

[1175] Inhibition of downstream signaling (pAkt/pERK1/2): Inhibition of ligand induced pAKT and pERK (phosphoAkt, phosphor ERK) in MCF-7 cells (cell based electrochemi-luminescence assay (ECLA)): MCF-7 cells (ATCC HTB 22) were serum starved and pre-incubated with Nanobodies (serial dilutions, starting concentration 666 nM or 167 nM) in serum-free media for 60 min at 37° C., 5% CO2. Cells were stimulated with 50 ng/ml HRG1-β1 EGF domain (R&D Systems, #396-HB) for 10 min, supernatants discarded and cells lysed in cold NP-40 lysis buffer (1% NP-40, 20 mM Tris, pH8.0, 137 mM NaCl, 10% glycerol, 2 mM EDTA, protease inhibitor cocktail set III (Calbiochem), phosphatase inhibitor cocktail set II (Calbiochem)). Cell lysates were tested in Phospho-Akt (Ser473) Whole Cell Lysate Kit (MSD, # K151CAD) and Phospho-ERK1/2 Whole Cell Lysate Kit (MSD, # K111DWD) according to manufacturer's instructions (Table C-28).

[1176] Formatted sequence optimized Nanobodies were able to potently block HRG-induced downstream signalling of HER3.

TABLE C-27
Inhibition of HRG induced pHER3

| | MCF-7, HRG | CHO HER2/HER3, | MDA-MB 468, |
|---|---|---|---|
| construct | IC50 (M) | HRG IC50 (M) | HRG IC50 (M) |
| HER3MS00135 | 1.21E−10 (n = 4) | 1.42E−09 (n = 3) | 1.54E−10 (n = 3) |
| HER3MS00137 | 8.80E−10 | 4.71E−09 | 1.12E−10 |
| HER3MS00139 | 3.49E−09 | 6.12E−09 | |
| HER3MS00141 | 4.35E−09 | 4.58E−09 | |
| HER3MS00147 | 5.98E−09 | 9.12E−09 | |
| HER3MS00149 | 3.54E−09 | 3.58E−09 | |
| HER3MS00150 | 2.32E−09 | 5.56E−09 | 5.38E−10 |
| HER3MS00209 | 1.17E−09 (n = 3) | 4.07E−09 (n = 3) | 1.02E−09 (n = 3) |
| HER3MS00212 | 5.33E−10 (n = 4) | 4.76E−09 (n = 3) | 8.00E−10 (n = 3) |
| HER3MS00213 | 5.21E−10 (n = 3) | 4.22E−09 (n = 3) | 5.99E−10 (n = 3) |
| HER3MS00214 | 1.56E−10 (n = 3) | 1.45E−09 (n = 3) | 9.84E−11 (n = 3) |
| HER3MS00215 | 1.59E−09 (n = 4) | 5.43E−09 (n = 3) | 1.60E−09 (n = 3) |

TABLE C-28
Inhibition of HRG induced pAKt and pERK

| | pAKT inhibition | pERK inhibition |
|---|---|---|
| Nanobody | (IC50 M) | (IC50 M) |
| HER3MS00135 | 1.494E−10 | 2.206E−10 |
| HER3MS00209 | 8.55E−10 | nd |
| HER3MS00212 | 5.56E−10 | 4.544E−10 |
| HER3MS00213 | 5.381E−10 | nd |
| HER3MS00214 | 1.147E−10 | nd |
| HER3MS00215 | 1.294E−09 | 3.811E−09 |

### Example 22

### Analysis of the HER1-HER3 Heterodimerization Blocking Capacity of the Multivalent Sequence Optimized Nanobodies with ALB 11 HLE in Cellular Assays

[1177] To determine the potency of multivalent sequence optimized Nanobodies in inhibiting EGFR ligand induced HER3 phosphorylation Nanobodies were tested in cell based assays as described below.

[1178] Inhibition of EGFR ligand induced pHER3 (phosphoHER3) in CHO EGFR/HER3 cells (cell based electrochemiluminescence assay (ECLA)): CHO EGFR/HER3 were serum starved and pre-incubated with Nanobodies (serial dilutions, starting concentration 666 nM or 167 nM) in serum-free media for 60 min at 37° C., 5% CO₂. Cells were stimulated with 100 ng/ml rhTGFα (R&D Systems, #239-A), for 10 min, supernatants discarded and cells lysed in cold NP-40 lysis buffer (1% NP-40, 20 mM Tris, pH8.0, 137 mM NaCl, 10% glycerol, 2 mM EDTA, protease inhibitor cocktail set III (Calbiochem), phosphatase inhibitor cocktail set II (Calbiochem)). MA6000 96 well plates (MSD, # L15XB) were blocked with 3% block A (MSD) in PBS, pH7.4, 0.05% Tween20 and coated with HER3 specific capture antibody (R&D Systems, # MAB3481). Cell lysates were added and incubated for 2 h at room temperature (RT). Biotinylated anti-phospho Tyrosine antibody (R&D Systems, # BAM1676) and sulfo tag streptavidin reagent (MSD, #R32AD) were used for detection (Table C-29). Multivalent sequence optimized Nanobodies containing 17B05 as building block potently inhibited EGFR ligand induced HER3 phosphorylation. Partial inhibition was observed with the multivalent Nanobody 214 (HER3MS00214), which does not include 17B05 as a building block.

TABLE C-29
Inhibition of EGFR ligand induced HER3 phosphorylation

| | CHO EGFR/HER3, TGFα |
|---|---|
| construct | IC50 (M) |
| HER3MS00135 | 1.54E−10 (n = 3) |
| HER3MS00137 | 5.078E−09 |
| HER3MS00139 | 6.952E−09 |
| HER3MS00141 | 5.636E−09 |
| HER3MS00147 | no effect |
| HER3MS00149 | nd |
| HER3MS00150 | nd |
| HER3MS00209 | 2.15E−09 (n = 3) |
| HER3MS00212 | 3.28E−09 (n = 3) |
| HER3MS00213 | 1.37E−08 (n = 3) |
| HER3MS00214 | *4.02E−09 (n = 3) |
| HER3MS00215 | 2.95E−09 (n = 3) |

*partial inhibition

### Example 23

### Migration Blocking Capacity of the Multivalent Sequence Optimized Nanobodies with ALB11 HLE

[1179] The ability of formatted sequence optimized Nanobodies to inhibit HRG1-β1 dependent cell migration was assessed in the following assay. A431 cells (CRL 1555) were seeded in HTS Fluoroblok 96 well plate inserts (BD Falcon #351164) in the presence of Nanobodies (serial dilutions; starting at 666 nM). Media plus 500 nM HRG1-β1 extracellular domain (R&D Systems, #377-HB) was added to the bottom wells. Migrated cells were stained with CalceinAM and fluorescence detected by plate reader. Nanobodies HER3MS00135, HER3MS00212, and HER3MS00215 potently inhibited A431 cell migration (Table C-30). All tested formatted sequence optimized Nanbodies potently block ligand induced cell migration.

TABLE C-30
Inhibition of HRG induced A431 cell migration

| construct | IC50 (M) |
|---|---|
| HER3MS00135 | 2.09E−10 |
| HER3MS00209 | 1.46E−08 |
| HER3MS00212 | 4.46E−09 |
| HER3MS00213 | 7.09E−10 |
| HER3MS00214 | 8.54E−11 |
| HER3MS00215 | 9.75E−09 |

### Example 24

### HER3-Specificity of Multivalent Sequence Optimized HER3-Specific Nanobodies with HLE

[1180] Off-target binding of multivalent HER3-specific Nanobodies with HLE was assessed by measuring their binding capacity to Fc-HER1 (R&D Systems, 344-ER), Fc-HER2 (R&D Systems, 1129-ER) and Fc-HER4 (R&D Systems, 1131-ER) coated on ELISA plates. Serial dilutions of the Nanobodies starting at a concentration of 500 nM were tested and detection was done using the biotinylated ALB-specific Nanobody 02H05 and streptavidin-HRP (Dako, P0397). Binding to Fc-HER3 (R&D Systems, 348-RB) was used as positive control for the HER3-specific Nanobodies. The polyclonal antibodies anti-HER1 (R&D Systems, AF231), anti-HER2 (R&D Systems, AF1129), anti-HER3 (R&D Systems, AF234) and anti-HER4 (R&D Systems, AF1131) were used as quality control of the HER coating on the plates. The results in FIGS. 3A to 3D show that multivalent sequence optimized Nanobodies bind to HER3 (FIG. 3B) but not to the other HER proteins (FIGS. 3A, 3C and 3D).

### Example 25

### Species Cross-Reactivity of Multivalent Sequence Optimized HER3-Specific Nanobodies with HLE

[1181] The species cross-reactivity of multivalent sequence optimized HER3-specific Nanobodies with HLE was analysed by measuring the binding capacity of these molecules to Chinese hamster ovary Flp-In cells transfected with human HER3, mouse HER3 or cyno HER3 by FACS. Serial dilutions starting at a concentration of 1 μM were incubated with the cells and detection was done using the biotinylated ALB-specific Nanobody 02H05 and streptavidin-PE (BD Pharmingen, 554061). The obtained EC50 values were maximum 4.4-fold times different when comparing binding to human HER3 with mouse HER3 or cyno HER3, suggesting cross-reactivity between human, mouse and cyno HER3 (Table C-31).

TABLE C-31
EC50-values of multivalent sequence optimized HER3-specific Nanobodies with HLE in
a FACS binding assay to human, mouse and cyno HER3 transfected CHO-FlpIn cells

| | Human | | Mouse | | Cyno | |
|---|---|---|---|---|---|---|
| ID | EC50 (M) | CI95 (M) | EC50 (M) | CI95 (M) | EC50 (M) | CI95 (M) |
| HER3MS00135 | 3.87E−09 | 3.228E−9 to | 1.09E−9 | 9.383E−10 to | 1.37E−9 | 1.124E−9 to |
| | | 4.640E−9 | | 1.263E−9 | | 1.674E−9 |
| HER3MS00212 | 8.29E−09 | 6.895E−9 to | 4.14E−9 | 3.381E−9 to | 4.36E−9 | 3.512E−9 to |
| | | 9.978E−9 | | 5.081E−9 | | 5.410E−9 |
| HER3MS00215 | 8.85E−09 | 7.294E−9 to | 6.30E−9 | 5.144E−9 to | 6.42E−9 | 5.067E−9 to |
| | | 1.074E−8 | | 7.710E−9 | | 8.128E−9 |
| HER3MS00214 | 9.07E−09 | 7.451E−9 to | 2.06E−9 | 1.704E−9 to | 2.77E−9 | 2.213E−9 to |
| | | 1.103E−8 | | 2.497E−9 | | 3.462E−9 |
| HER3MS00213 | 9.21E−09 | 7.442E−9 to | 1.18E−8 | 9.070E−9 to | 6.59E−9 | 5.358E−9 to |
| | | 1.139E−8 | | 1.527E−8 | | 8.115E−9 |
| HER3MS00209 | 6.43E−09 | 5.366E−9 to | 3.92E−9 | 3.289E−9 to | 4.10E−9 | 3.327E−9 to |
| | | 7.709E−9 | | 4.682E−9 | | 5.040E−9 |

### Example 26

### Binding of Multivalent Sequence Optimized HER3-Specific Nanobodies with ALB11 HLE to Serum Albumin

[1182] Binding affinity of three multivalent sequence optimized HER3-specific Nanobodies with ALB11 half life extension to human, mouse and cyno serum albumin was determined by surface plasmon resonance using Biacore. Serum albumin from human (Sigma #A3782), cyno (in house production) and mouse (Sigma, #A3559) were covalently bound to the sensor chip surface via amine coupling using EDC/NHS for activation and ethanolamine HCl for deactivation. Nanobodies were injected for 2 minutes at a flow rate of 45 μl/min to allow binding to chip-bound antigen. Next, binding buffer was sent over the chip at the same flow rate to allow spontaneous dissociation of bound Nanobody. The kinetic parameters kon-values (ka), koff-values (kd) and KD were calculated from the sensorgrams obtained for the different Nanobodies (Table C-32).

TABLE C-32
Kinetic parameters for multivalent sequence
optimized HER3-specific Nanobodies

| | | Human | Cyno | Mouse |
|---|---|---|---|---|
| HER3MS00135 | ka (1/Ms) | 1.68^{E}5 | 1.38^{E}5 | 1.31^{E}5 |
| | kd (1/Ms) | 4.44^{E}−3 | 4.15^{E}−3 | 5.76^{E}−2 |
| | KD (nM) | 26.5 | 30.1 | 439 |
| HER3MS00212 | ka (1/Ms) | 1.64^{E}5 | 1.38^{E}5 | 1.19^{E}5 |
| | kd (1/Ms) | 5.21^{E}−3 | 4.83^{E}−3 | 7.24^{E}−2 |
| | KD (nM) | 31.7 | 34.9 | 610 |
| HER3MS00215 | ka (1/Ms) | 1.73^{E}5 | 1.47^{E}5 | 1.56^{E}5 |
| | kd (1/Ms) | 4.57^{E}−3 | 4.29^{E}−3 | 5.93^{E}−2 |
| | KD (nM) | 26.4 | 29.2 | 380 |

### Example 27

### Inhibition of pHER3 and Downstream Signaling in Human Cancer Cell Lines

[1183] Formatted sequence optimized Nanobodies potently inhibit pHER3 and downstream signaling in human cancer cell lines as shown for MCF-7 (Example 21 above) and others like BxPC3 a pancreatic cancer cell line and BT-474 a breast cancer cell line.

[1184] 17B05 and formatted Nanobodies including sequence optimized 17B05 (HER3MS00119) as building block inhibit HER3 signaling in both EGFR/HER3 driven (in BxPC3 cells) as well as HER2/HER3 (BT-474, Her2 overexpressing cell line) cell lines.

[1185] BxPC3 (ATCC CRL-1687) and BT-47 (ATCC HTB-20) cells were serum starved and pre-incubated with Nanobodies (serial dilutions, starting concentration 167 nM) for 60 min at 37° C., 5% CO₂. Cells were stimulated with 100 ng/ml HRG1-β1 EGF domain (R&D Systems, #396-HB) for 10 min, supernatants discarded and cells lysed in cold RIPA lysis buffer (1% NP-40 (Nonidet P40), 0.5% (V/V) Sodium-Deoxycholat, 0.1% (V/V) SDS, 50 mM Tris/HCl, pH 7.5, 150 mM NaCl, 5 mM EDTA, protease inhibitor cocktail set III (Calbiochem), phosphatase inhibitor cocktail set II (Calbiochem)) for 45 min at 4° C. After centrifugation, 4× sample buffer (Biorad #161-0791) was added to the supernatants and samples analysed by SDS-PAGE (Criterion XT precast get, 4-12%, Bis Tris, Biorad #345-0125) followed by WB. Detection antibodies: pHER3Tyr1289 (Cell Signaling#4791), pHER3 pTyr1197 (Cell Signaling#4561), pAkt (Ser473) (Cell Signaling#4060), pERK1/2 (Thr202/Thr204) (Cell Signaling#9101), HER3 (Millipore #05-390), Akt (Cell Signaling#9272), EKR1/2 (Cell Signaling#4695).

[1186] The results are shown in FIGS. 5A and 5B, as well as FIGS. 6A to 6C. FIG. 5 shows the inhibition of pHER3 and downstream signalling in BT-474 breast cancer cells by formatted sequence optimized Nanobodies: FIG. 5A): lanes 1-6 Nanobody HER3MS00135 (0, 0.65, 2.7, 10, 42, 167 nM), lanes 7-12 Nanobody HER3MS00212 (0, 0.65, 2.7, 10, 42, 167 nM), lanes 13-18 Nanobody HER3MS00215 (0, 0.65, 2.7, 10, 42, 167 nM), lane 19 untreated, unstimulated cells. FIG. 5B): lanes 7-12 Nanobody HER3MS00119 (0, 0.65, 2.7, 10, 42, 167 nM). FIG. 6 shows the inhibition of pHER3 and downstream signalling in BxPC3 breast cancer cells by formatted sequence optimized Nanobodies: FIG. 6A): lanes 13-18 Nanobody HER3MS00 119 (0, 0.65, 2.7, 10, 42, 167 nM), lanes 19-24 HER3MS00135 (0, 0.65, 2.7, 10, 42, 167 nM). FIG. 6B) lanes 1-6 HER3MS00213 (0, 0.65, 2.7, 10, 42, 167 nM), 7-12 HER3MS00214 (0, 0.65, 2.7, 10, 42, 167 nM). FIG. 6C): lanes 1-6 HER3MS00209 (0, 0.65, 2.7, 10, 42, 167 nM), lanes 7-12 HER3MS00212 (0, 0.65, 2.7, 10, 42, 167 nM), lanes 13-18 HER3MS00215 (0, 0.65, 2.7, 10, 42, 167 nM), lane 19 untreated, unstimulated cells, lanes 20-24 unrelated control Nanobody (0.65, 2.7, 10, 42, 167 nM).

### Example 28

### A549 In Vivo Model: Inhibition of Tumor Growth by Formatted Sequence Optimized Nanobodies

[1187] To assess the efficacy of formatted sequence optimized Nanobodies, A549 xenograft model of human lung cancer was established in nude mice and the inhibition of tumor growth was assessed at multiple doses. T-Cell deficient nude/nude mice (6 weeks old female mice originated at NIH, outbread, albino background) were purchase from Charles River Laboratories (Wilmington, Mass.) for xenograft studies. A549 cells (ATCC, CCL-185) were grown in culture media (RPMI, 10% FBS; L-glutamine, 37° C., 5% CO₂). Mice were injected with 5E+6 cells in 100 μl PBS on the right flank subcutaneously. Initial tumor growth and body weight was monitored. After 13 days tumors reached an average volume of 174 mm³ and mice were randomized into groups of 10. Mice were dosed intra-peritoneally every third day with 1 mg/kg, 3 mg/kg, or 10 mg/kg of Nanobodies HER3MS00135, HER3MS00212, or HER3MS00215, respectively. Alb11 was used as control at 10 mg/kg. PBS was used as vehicle control. Treatment duration was 20 days. Tumor volume and body weight were recorded twice per week. Percent body weight data were analyzed by One Way ANOVA followed by Dunnett's post-hoc comparisons versus the controls. Tumor volume data were analyzed by Repeated Measures ANOVA followed by post-hoc Bonferrioni pair wise comparisons (α=0.05).

[1188] The median tumor volumes from each control and treatment group are shown in FIGS. 7A to 7C (for HER3MS00135, HER3MS00212 and HER3MS00215, respectively).

[1189] Administration of the Nanobodies resulted in significant dose dependent tumor growth inhibition of the human lung cancer xenograft model when compared to tumors treated with PBS vehicle control or Alb11.

The application's sequence listing, which the Patent Office published only in electronic form, follows.

SEQUENCE LISTING (444 sequences)

SEQ ID NO: 1 - protein, 1342 aa, Homo sapiens
MRANDALQVLGLLFSLARGSEVGNSQAVCPGTLNGLSVTGDAENQYQTLYKLYERCEVVMGNLEIVLTGHNADLSFLQWIREVTGYVLVAMNEFSTLPLPNLRVVRGTQVYDGKFAIFVMLNYNTNSSHALRQLRLTQLTEILSGGVYIEKNDKLCHMDTIDWRDIVRDRDAEIVVKDNGRSCPPCHEVCKGRCWGPGSEDCQTLTKTICAPQCNGHCFGPNPNQCCHDECAGGCSGPQDTDCFACRHFNDSGACVPRCPQPLVYNKLTFQLEPNPHTKYQYGGVCVASCPHNFVVDQTSCVRACPPDKMEVDKNGLKMCEPCGGLCPKACEGTGSGSRFQTVDSSNIDGFVNCTKILGNLDFLITGLNGDPWHKIPALDPEKLNVFRTVREITGYLNIQSWPPHMHNFSVFSNLTTIGGRSLYNRGFSLLIMKNLNVTSLGFRSLKEISAGRIYISANRQLCYHHSLNWTKVLRGPTEERLDIKHNRPRRDCVAEGKVCDPLCSSGGCWGPGPGQCLSCRNYSRGGVCVTHCNFLNGEPREFAHEAECFSCHPECQPMEGTATCNGSGSDTCAQCAHFRDGPHCVSSCPHGVLGAKGPIYKYPDVQNECRPCHENCTQGCKGPELQDCLGQTLVLIGKTHLTMALTVIAGLVVIFMMLGGTFLYWRGRRIQNKRAMRRYLERGESIEPLDPSEKANKVLARIFKETELRKLKVLGSGVFGTVHKGVWIPEGESIKIPVCIKVIEDKSGRQSFQAVTDHMLAIGSLDHAHIVRLLGLCPGSSLQLVTQYLPLGSLLDHVRQHRGALGPQLLLNWGVQIAKGMYYLEEHGMVHRNLAARNVLLKSPSQVQVADFGVADLLPPDDKQLLYSEAKTPIKWMALESIHFGKYTHQSDVWSYGVTVWELMTFGAEPYAGLRLAEVPDLLEKGERLAQPQICTIDVYMVMVKCWMIDENIRPTFKELANEFTRMARDPPRYLVIKRESGPGIAPGPEPHGLTNKKLEEVELEPELDLDLDLEAEEDNLATTTLGSALSLPVGTLNRPRGSQSLLSPSSGYMPMNQGNLGESCQESAVSGSSERCPRPVSLHPMPRGCLASESSEGHVTGSEAELQEKVSMCRSRSRSRSPRPRGDSAYHSQRHSLLTPVTPLSPPGLEEEDVNGYVMPDTHLKGTPSSREGTLSSVGLSSVLGTEEEDEDEEYEYMNRRRRHSPPHPPRPSSLEELGYEYMDVGSDLSASLGSTQSCPLHPVPIMPTAGTTPDEDYEYMNRQRDGGGPGGDYAAMGACPASEQGYEEMRAFQGPGHQAPHVHYARLKTLRSLEATDSAFDNPDYWHSRLFPKANAQRT

SEQ ID NO: 2 - protein, 642 aa, Gallus gallus
MRANDALQVLGLLFSLARGSEVGNSQAVCAGTLNGLSVTGDAQHQYRTLHKMYNNCEIVMGNLEIVLIDHTQDLSFLQTIREVTGYILIAMNVFSTLPLRNLRVIRGTQFYEEKYALFVLLNYNPNATHALRQLGLNRLTEILAGGVYIEKNEQLCHVDTVEWRDIMRDPRLEPVVGDNGRACAPCHESCGGHCWGPGPEDCQQLTKTICAPQCNGRCFGRAPNECCHEECAGGCTGPLQTHCFACRHFNDSGACVPLCPQPLIYNKLTFQLEPNPDTKYQYGSVCVRSCPHNFVVDQSSCVRACPSNKMEVEKNGLKMCEPCAGLCPKACEGTGAGSHYQTVDSSNIDSFVNCTKILGNLDFLITGLEGDPWRNISALDPEKLNVFRTVREITGYLNIQSWPKHMHNFSVFSNLETIGGRSLYNRGFSLLIMKNDNVTSLGLRSLREVSAGRVYITENRRLCYLHTVQWAALSRRRADLDIRNNKPRGKCQQEGKVCDPLCSADGCWGPGPAQCLSCRHYSRRGVCVESCSFTQGETREFAEGTECFECHPECERVEGGITCNGSGADTCTRCAHYRDGPHCVERCPEGILGERGPIYKYPDSSRECRPCHENCTRGCTGPLLQDCLGDALPSARRAPTVI

SEQ ID NO: 3 - protein, 649 aa, Macaca fascicularis
MRANGALQVLGLLFNLARGSEVGNSQAVCPGTLNGLSVTGDAENQYQTLYKLYERCEVVMGNLEIVLTGHNADLSFLQWIREVTGYVLVAMNEFSTLPLPNLRVVRGTQVYDGKFAIFVMLNYNTNSSHALRQLRLTQLTEILSGGVYIEKNDKLCHMDTIDWKDIVRDQDAEIVVKDNGRSCPLCHEVCKGRCWGPGPEDCQTLTKTICAPQCNGHCFGPNPNQCCHDECAGGCSGPQDTDCFACRHFNDSGACVPRCPQPLVYNKLTFQLEPNPHTKYQYGGVCVASCPHNFVVDQTSCVRACPPDKMEVDKNGLKMCEPCGGLCPKACEGTGSGSRFQTVDSSNIDGFVNCTKILGNLDFLITGLNGDPWHKIPALDPEKLNVFRTVREITGYLNIQSWPPHMYNFSVFSNLTTIGGRSLYNRGFSLLIMKNLNVTSLGFRSLKEISAGRIYISANRQLCYHHSLNWTKVLRGPTEERLDIKHNRPRRDCVAEGKVCDPLCSSGGCWGPGPGQCLSCRNYSRGGVCVTHCNFLNGEPREFAHEAECFSCHPECQPMEGTATCNGSGSDTCAQCAHFRDGPHCVSSCPHGVLGAKGPIYKYPDVQNECRPCHENCTQGCKGPELQDCLGQTLVLIGKTHLTHHHHHH

SEQ ID NO: 4 - protein, 649 aa, Homo sapiens
MRANDALQVLGLLFSLARGSEVGNSQAVCPGTLNGLSVTGDAENQYQTLYKLYERCEVVMGNLEIVLTGHNADLSFLQWIREVTGYVLVAMNEFSTLPLPNLRVVRGTQVYDGKFAIFVMLNYNTNSSHALRQLRLTQLTEILSGGVYIEKNDKLCHMDTIDWRDIVRDRDAEIVVKDNGRSCPPCHEVCKGRCWGPGSEDCQTLTKTICAPQCNGHCFGPNPNQCCHDECAGGCSGPQDTDCFACRHFNDSGACVPRCPQPLVYNKLTFQLEPNPHTKYQYGGVCVASCPHNFVVDQTSCVRACPPDKMEVDKNGLKMCEPCGGLCPKACEGTGSGSRFQTVDSSNIDGFVNCTKILGNLDFLITGLNGDPWHKIPALDPEKLNVFRTVREITGYLNIQSWPPHMHNFSVFSNLTTIGGRSLYNRGFSLLIMKNLNVTSLGFRSLKEISAGRIYISANRQLCYHHSLNWTKVLRGPTEERLDIKHNRPRRDCVAEGKVCDPLCSSGGCWGPGPGQCLSCRNYSRGGVCVTHCNFLNGEPREFAHEAECFSCHPECQPMEGTATCNGSGSDTCAQCAHFRDGPHCVSSCPHGVLGAKGPIYKYPDVQNECRPCHENCTQGCKGPELQDCLGQTLVLIGKTHLTHHHHHH

SEQ ID NO: 5 - protein, 642 aa, Artificial Sequence
  chimeric
MRANDALQVLGLLFSLARGSEVGNSQAVCPGTLNGLSVTGDAENQYQTLYKLYERCEVVMGNLEIVLTGHNADLSFLQWIREVTGYVLVAMNEFSTLPLPNLRVVRGTQVYDGKFAIFVMLNYNTNSSHALRQLRLTQLTEILSGGVYIEKNDKLCHMDTIDWRDIVRDRDAEIVVKDNGRSCPPCHEVCKGRCWGPGSEDCQTLTKTICAPQCNGRCFGRAPNECCHEECAGGCTGPLQTHCFACRHFNDSGACVPLCPQPLIYNKLTFQLEPNPDTKYQYGSVCVRSCPHNFVVDQSSCVRACPSNKMEVEKNGLKMCEPCAGLCPKACEGTGAGSHYQTVDSSNIDSFVNCTKILGNLDFLITGLEGDPWRNISALDPEKLNVFRTVREITGYLNIQSWPKHMHNFSVFSNLETIGGRSLYNRGFSLLIMKNDNVTSLGLRSLREVSAGRVYITENRRLCYLHTVQWAALSRRRADLDIRNNKPRGKCQQEGKVCDPLCSADGCWGPGPAQCLSCRHYSRRGVCVESCSFTQGETREFAEGTECFECHPECERVEGGITCNGSGADTCTRCAHYRDGPHCVERCPEGILGERGPIYKYPDSSRECRPCHENCTRGCTGPLLQDCLGDALPSARRAPTVI

SEQ ID NO: 6 - protein, 642 aa, Artificial Sequence
  chimeric
MRANDALQVLGLLFSLARGSEVGNSQAVCAGTLNGLSVTGDAQHQYRTLHKMYNNCEIVMGNLEIVLIDHTQDLSFLQTIREVTGYILIAMNVFSTLPLRNLRVIRGTQFYEEKYALFVLLNYNPNATHALRQLGLNRLTEILAGGVYIEKNEQLCHVDTVEWRDIMRDPRLEPVVGDNGRACAPCHESCGGHCWGPGPEDCQQLTKTICAPQCNGHCFGPNPNQCCHDECAGGCSGPQDTDCFACRHFNDSGACVPRCPQPLVYNKLTFQLEPNPHTKYQYGGVCVASCPHNFVVDQTSCVRACPPDKMEVDKNGLKMCEPCGGLCPKACEGTGAGSHYQTVDSSNIDSFVNCTKILGNLDFLITGLEGDPWRNISALDPEKLNVFRTVREITGYLNIQSWPKHMHNFSVFSNLETIGGRSLYNRGFSLLIMKNDNVTSLGLRSLREVSAGRVYITENRRLCYLHTVQWAALSRRRADLDIRNNKPRGKCQQEGKVCDPLCSADGCWGPGPAQCLSCRHYSRRGVCVESCSFTQGETREFAEGTECFECHPECERVEGGITCNGSGADTCTRCAHYRDGPHCVERCPEGILGERGPIYKYPDSSRECRPCHENCTRGCTGPLLQDCLGDALPSARRAPTVI

SEQ ID NO: 7 - protein, 642 aa, Artificial Sequence
  chimeric
MRANDALQVLGLLFSLARGSEVGNSQAVCAGTLNGLSVTGDAQHQYRTLHKMYNNCEIVMGNLEIVLIDHTQDLSFLQTIREVTGYILIAMNVFSTLPLRNLRVIRGTQFYEEKYALFVLLNYNPNATHALRQLGLNRLTEILAGGVYIEKNEQLCHVDTVEWRDIMRDPRLEPVVGDNGRACAPCHESCGGHCWGPGPEDCQQLTKTICAPQCNGRCFGRAPNECCHEECAGGCTGPLQTHCFACRHFNDSGACVPLCPQPLIYNKLTFQLEPNPDTKYQYGSVCVRSCPHNFVVDQSSCVRACPSNKMEVEKNGLKMCEPCAGLCPKACEGTGAGSHYQTVDSSNIDSFVNCTKILGNLDFLITGLEGDPWRNISALDPEKLNVFRTVREITGYLNIQSWPKHMHNFSVFSNLETIGGRSLYNRGFSLLIMKNDNVTSLGLRSLREVSAGRVYITENRRLCYLHTVQWAALSRRRADLDIRNNKPRGKCQQEGKVCDPLCSSGGCWGPGPGQCLSCRNYSRGGVCVTHCNFLNGEPREFAHEAECFSCHPECQPMEGTATCNGSGSDTCAQCAHFRDGPHCVSSCPHGVLGAKGPIYKYPDVQNECRPCHENCTQGCKGPELQDCLGQTLVLIGKTHLTM

SEQ ID NO: 8 - protein, 1210 aa, Homo sapiens
MRPSGTAGAALLALLAALCPASRALEEKKVCQGTSNKLTQLGTFEDHFLSLQRMFNNCEVVLGNLEITYVQRNYDLSFLKTIQEVAGYVLIALNTVERIPLENLQIIRGNMYYENSYALAVLSNYDANKTGLKELPMRNLQEILHGAVRFSNNPALCNVESIQWRDIVSSDFLSNMSMDFQNHLGSCQKCDPSCPNGSCWGAGEENCQKLTKIICAQQCSGRCRGKSPSDCCHNQCAAGCTGPRESDCLVCRKFRDEATCKDTCPPLMLYNPTTYQMDVNPEGKYSFGATCVKKCPRNYVVTDHGSCVRACGADSYEMEEDGVRKCKKCEGPCRKVCNGIGIGEFKDSLSINATNIKHFKNCTSISGDLHILPVAFRGDSFTHTPPLDPQELDILKTVKEITGFLLIQAWPENRTDLHAFENLEIIRGRTKQHGQFSLAVVSLNITSLGLRSLKEISDGDVIISGNKNLCYANTINWKKLFGTSGQKTKIISNRGENSCKATGQVCHALCSPEGCWGPEPRDCVSCRNVSRGRECVDKCKLLEGEPREFVENSECIQCHPECLPQAMNITCTGRGPDNCIQCAHYIDGPHCVKTCPAGVMGENNTLVWKYADAGHVCHLCHPNCTYGCTGPGLEGCPTNGPKIPSIATGMVGALLLLLVVALGIGLFMRRRHIVRKRTLRRLLQERELVEPLTPSGEAPNQALLRILKETEFKKIKVLGSGAFGTVYKGLWIPEGEKVKIPVAIKELREATSPKANKEILDEAYVMASVDNPHVCRLLGICLTSTVQLITQLMPFGCLLDYVREHKDNIGSQYLLNWCVQIAKGMNYLEDRRLVHRDLAARNVLVKTPQHVKITDFGLAKLLGAEEKEYHAEGGKVPIKWMALESILHRIYTHQSDVWSYGVTVWELMTFGSKPYDGIPASEISSILEKGERLPQPPICTIDVYMIMVKCWMIDADSRPKFRELIIEFSKMARDPQRYLVIQGDERMHLPSPTDSNFYRALMDEEDMDDVVDADEYLIPQQGFFSSPSTSRTPLLSSLSATSNNSTVACIDRNGLQSCPIKEDSFLQRYSSDPTGALTEDSIDDTFLPVPEYINQSVPKRPAGSVQNPVYHNQPLNPAPSRDPHYQDPHSTAVGNPEYLNTVQPTCVNSTFDSPAHWAQKGSHQISLDNPDYQQDFFPKEAKPNGIFKGSTAENAEYLRVAPQSSEFIGA

SEQ ID NO: 9 - protein, 1255 aa, Homo sapiens [sequence omitted]

SEQ ID NO: 10 - protein, 1308 aa, Homo sapiens
MKPATGLWVWVSLLVAAGTVQPSDSQSVCAGTENKLSSLSDLEQQYRALRKYYENCEVVMGNLEITSIEHNRDLSFLRSVREVTGYVLVALNQFRYLPLENLRIIRGTKLYEDRYALAIFLNYRKDGNFGLQELGLKNLTEILNGGVYVDQNKFLCYADTIHWQDIVRNPWPSNLTLVSTNGSSGCGRCHKSCTGRCWGPTENHCQTLTRTVCAEQCDGRCYGPYVSDCCHRECAGGCSGPKDTDCFACMNFNDSGACVTQCPQTFVYNPTTFQLEHNFNAKYTYGAFCVKKCPHNFVVDSSSCVRACPSSKMEVEENGIKMCKPCTDICPKACDGIGTGSLMSAQTVDSSNIDKFINCTKINGNLIFLVTGIHGDPYNAIEAIDPEKLNVFRTVREITGFLNIQSWPPNMTDFSVFSNLVTIGGRVLYSGLSLLILKQQGITSLQFQSLKEISAGNIYITDNSNLCYYHTINWTTLFSTINQRIVIRDNRKAENCTAEGMVCNHLCSSDGCWGPGPDQCLSCRRFSRGRICIESCNLYDGEFREFENGSICVECDPQCEKMEDGLLTCHGPGPDNCTKCSHFKDGPNCVEKCPDGLQGANSFIFKYADPDRECHPCHPNCTQGCNGPTSHDCIYYPWTGHSTLPQHARTPLIAAGVIGGLFILVIVGLTFAVYVRRKSIKKKRALRRFLETELVEPLTPSGTAPNQAQLRILKETELKRVKVLGSGAFGTVYKGIWVPEGETVKIPVAIKILNETTGPKANVEFMDEALIMASMDHPHLVRLLGVCLSPTIQLVTQLMPHGCLLEYVHEHKDNIGSQLLLNWCVQIAKGMMYLEERRLVHRDLAARNVLVKSPNHVKITDFGLARLLEGDEKEYNADGGKMPIKWMALECIHYRKFTHQSDVWSYGVTIWELMTFGGKPYDGIPTREIPDLLEKGERLPQPPICTIDVYMVMVKCWMIDADSRPKFKELAAEFSRMARDPQRYLVIQGDDRMKLPSPNDSKFFQNLLDEEDLEDMMDAEEYLVPQAFNIPPPIYTSRARIDSNRSEIGHSPPPAYTPMSGNQFVYRDGGFAAEQGVSVPYRAPTSTIPEAPVAQGATAEIFDDSCCNGTLRKPVAPHVQEDSSTQRYSADPTVFAPERSPRGELDEEGYMTPMRDKPKQEYLNPVEENPFVSRRKNGDLQALDNPEYHNASNGPPKAEDEYVNEPLYLNTFANTLGKAEYLKNNILSMPEKAKKAFDNPDYWNHSLPPRSTLQHPDYLQEYSTKYFYKQNGRIRPIVAENPEYLSEFSLKPGTVLPPPPYRHRNTVV

SEQ ID NO: 11 - protein, 115 aa, Artificial Sequence [sequence omitted]

SEQ ID NO: 12 - protein, 115 aa, Artificial Sequence
  Nanobody sequence
EVQLVESGGGLVQPGGSLRLSCVASGFTFSSYWMYWVRQAPGKGVEWVSAISPGGVERYTDSVKGRFTISRDNAKNTLYLQMNSLKSEDTAMYYCARLTSFATPESQGTQVTVSS

SEQ ID NO: 13 - protein, 118 aa, Artificial Sequence
  Nanobody sequence
EVQLVESGGGLVQPGGSLRLSCAASGSIGGLNAMAWYRQAPGKERELVAGIFGVGSTRYADSVKGRFTISRDIAKNTVFLQMNSLNSEDTAVYYCRMSSVTRGSSDYWGQGTQVTVSS

SEQ ID NO: 14 - protein, 114 aa, Artificial Sequence
  Nanobody sequence
EVQLVESGGGLVQAGGSLRLSCAASGLTFGSAPMGWYRQAPGKERELVAYISGDERIWYGDSVKGRFTISRDTTKNTLYLQMNSLKPEDTAVYYCVSDVKVRHWGQGTQVTVSS

SEQ ID NO: 15 - protein, 113 aa, Artificial Sequence
  Nanobody sequence
EVQLVESGGGLVQAGGSLRLSCAASGFTFSSYPMSWVRQAPGKGPAWVSTVSPGGITTSYADSVKGRFTISRDNAKNTLYLQMNSLKPEDTAVYYCLRDLNNRGQGTQVTVSS

SEQ ID NO: 16 - protein, 122 aa, Artificial Sequence
  Nanobody sequence
EVQLVESGGGLVQPGGSLRLSCAASGTLFKINAMGWYRQAPGKRRELVALITSSDTTDYAESVEGRFTISRDNTWNAVYLQMNSLKPEDTAVYYCHSDHYSMGVPEKRVIMYGQGTQVTVSS

SEQ ID NO: 17 - protein, 122 aa, Artificial Sequence
  Nanobody sequence
EVQLVESGGGLVQPGGSLRLSCAASGTLFKINAMGWYRQAPGKQRELVALITSSDTTDYAESVEGRFTISRDNTWNAVYLQMNSLKPEDTAVYYCHSDHYSMGVPEKRVIMYGQGTQVTVSS

SEQ ID NO: 18 - protein, 120 aa, Artificial Sequence
  Nanobody sequence
EVQLVESGGGLVQPGGSLGLSCVASGSIFRINAMAWYRQAPGKQRELVAEITAGGSTNYADSVKGRFTISVDNAWNTLYLQMNSLKVEDTAVYYCNLDHYTTWDRRSAYWGQGTQVTVSS

SEQ ID NO: 19 - protein, 127 aa, Artificial Sequence
  Nanobody sequence
EVQLVESGGGLVQAGGSLRLSCAASGFTFDDYAIGWFRQAPGKEREGVSCISSSDGSTVYADSVKGRFTISSDNAKNTVYLQMNSLKPEDTAVYYCAAERRRGYSDLCRFYYGMDYWGKGTQVTVSS

SEQ ID NO: 20 - protein, 125 aa, Artificial Sequence
  Nanobody sequence
EVQLVESGGGLMQAGDSLRLSCAASGRAFSSYALGWFRRAPGKERECVAATDRLGDNTYFPDSVKGRFTISRDNAKNTLYLQMNNLKPEDTAVYYCAAGAVRYGVSTSPMNYNYWGQGTQVTVSS

SEQ ID NO: 21 - protein, 127 aa, Artificial Sequence
  Nanobody sequence
EVQLVESGGGLVQPGGSLRLSCAASGFTFDYYTIGWFRQAPGKEREGVSCISSRDGDSYYADSVKGRFTISRDNAKNTAYLQMNSLKPEDTAVYYCAASASDYGLGLELFHDEYNYWGQGTQVTVSS

SEQ ID NO: 22 - protein, 125 aa, Artificial Sequence
  Nanobody sequence
EVQLVESGGGLVQAGGSLRLSCAASGRTYYLNAMGWFRQGPGKDREFVAAIDWSDGNKDYADSVKGRFTISRDNAKNTVYLQMNSLKPEDTAVYYCAADTPPWGPMIYIESYDSWGQGTQVTVSS

SEQ ID NO: 23 - protein, 127 aa, Artificial Sequence
  Nanobody sequence
EVQLVESGGGLVQAGGSLRLSCAASGFTFDGYAIGWFRQAPGKEREGVSCISGGDGRSYYADSVKGRFTVSSDNAKNTLYLEMNSLKPEDTAVYYCAVIWGPYCSDSYEYLYEYDYWGQGTQVTVSS

SEQ ID NO: 24 - protein, 127 aa, Artificial Sequence
  Nanobody sequence
EVQLVESGGGLVQAGGSLRLSCAASGFTFDDYTIGWFRQAPGKEREEISCISNNDGSTYYTNSVKGRFTISSDNAKNTVYLQMNSLKPEDTAVYYCAASPHGCWYDLIPLQADFGSWGQGTQVTVSS

SEQ ID NO: 25 - protein, 121 aa, Artificial Sequence
  Nanobody sequence
EVQLVESGGGLVQPGGSLRLSCSASGSIFGLNAMGWYRQTPGKERELVAGITSITRVGSTRYADSAKGRFTISGDYAKNTVYLQMNSLKPEDTGVYYCRMSIVKSGGADYWGQGTQVTVSS

SEQ ID NO: 26 - protein, 114 aa, Artificial Sequence
  Nanobody sequence
EVQLVESGGGLVQPGGSLKLSCVASGSMFRFYHMAWYRQAPGEQRELVARIYTGGDTIYGDSVLGRFTISRDNSKNTVYLQMNTLKPEDTGVYYCNAFREYHIWGQGTQVTVSS

SEQ ID NO: 27 - DNA, 414 bp, Artificial Sequence
  Nanobody sequence
gaggtgcaattggtggagtctgggggaggcttggtgcagcctggggggtctctgagactctcctgtgtagcctctggattcacgttcagttcctactggatgtattgggtccgtcaggctccagggaagggggtcgagtgggtctcagcaattagtcctggtggtgttgaacgatatacagactccgtgaagggccgattcaccatctccagagacaacgccaaaaacacactgtatctccaaatgaacagtctgaaatctgaggacacggccatgtattactgtgcacgactaacatcttttgccacacccgagagccaggggacccaggtcaccgtctcctcagcggccgcagaacaaaaactcatctcagaagaggatctgaatggggccgcacatcatcatcatcatcat

SEQ ID NO: 28 - DNA, 423 bp, Artificial Sequence
  Nanobody sequence
gaggtgcaattggtggagtctgggggaggcttggtgcaacctggggggtctctgagactctcctgcgcagcctctggaagcatcggcggtctcaatgccatggcctggtaccgccaggctccaggaaaagagcgcgagttggtcgcaggtatttttggcgttggtagcacgaggtacgcggactccgtgaagggccgattcaccatctctagagacatcgccaagaacacggtgtttctgcaaatgaacagcctgaattctgaggacacggccgtttattactgtcggatgtcaagtgttactcgtggtagttctgactactggggtcaggggacccaggtcaccgtctcctcagcggccgcagaacaaaaactcatctcagaagaggatctgaatggggccgcacatcatcatcatcatcat

SEQ ID NO: 29 - DNA, 411 bp, Artificial Sequence
  Nanobody sequence
gaggtgcaattggtggagtctgggggaggattggtgcaggctgggggctctctgagactctcctgtgcagcctctggactgacgttcggtagcgcgcctatgggctggtaccgccaggctccagggaaggagcgcgagttggtcgcttatattagtggtgatgagagaatatggtatggagactctgtgaaggggcgattcaccatctccagagacactaccaagaacacgctgtatctgcaaatgaacagcctgaaacctgaggacacggccgtttattattgtgtatcagatgttaaagtcaggcactggggccaggggacccaggtcaccgtctcctcagcggccgcagaacaaaaactcatctcagaagaggatctgaatggggccgcacatcatcatcatcatcat

SEQ ID NO: 30 - DNA, 408 bp, Artificial Sequence
  Nanobody sequence
gaggtgcaattggtggagtctgggggaggcttggtgcaggctggggggtctctgagactctcctgtgcagcctctggattcaccttcagtagctatcccatgagctgggtccgccaggctccaggaaaggggcccgcgtgggtctcaactgttagtcctggtggtataaccacaagctatgcagactccgtgaagggccgattcaccatctccagagacaacgccaagaacacgctgtatttgcaaatgaacagcctgaaacctgaggacacggccgtgtattactgcttaagagatctgaataataggggccaggggacccaggtcaccgtctcctcagcggccgcagaacaaaaactcatctcagaagaggatctgaatggggccgcacatcatcatcatcatcat

SEQ ID NO: 31 - DNA, 435 bp, Artificial Sequence
  Nanobody sequence
gaggtgcaattggtggagtctgggggaggcttggtgcagcctggggggtctctgagactctcctgtgcagcctctggaacgctcttcaaaatcaacgccatgggctggtaccgccaggctccagggaagcggcgcgagttggtcgcacttattactagtagcgatacaacggattatgcagagtccgtggagggccgattcaccatctccagagacaacacgtggaacgcggtgtatctgcaaatgaacagtctgaaacctgaggatacggccgtctattactgtcactcagatcattactcgatgggtgtgcctgaaaagcgagtcataatgtacggccaggggacccaggtcaccgtctcctcagcggccgcagaacaaaaactcatctcagaagaggatctgaatggggccgcacatcatcatcatcatcat

SEQ ID NO: 32 - DNA, 435 bp, Artificial Sequence
  Nanobody sequence
gaggtgcaattggtggagtctgggggaggcttggtgcagcctggggggtctctgagactctcctgtgcagcctctggaacgctcttcaaaatcaacgccatgggctggtaccgccaggctccagggaagcagcgcgagttggtcgcacttattactagtagcgatacaacggattatgcagagtccgtggagggccgattcaccatctccagagacaacacgtggaacgcggtgtatctgcaaatgaacagtctgaaacctgaggatacggccgtctattactgtcactcagatcattactcgatgggtgtgcctgaaaagcgagtcataatgtacggccaggggacccaggtcaccgtctcctcagcggccgcagaacaaaaactcatctcagaagaggatctgaatggggccgcacatcatcatcatcatcat

SEQ ID NO: 33 - DNA, 429 bp, Artificial Sequence
  Nanobody sequence
gaggtgcaattggtggagtctgggggaggcttggtgcagcctggggggtctctgggactctcctgtgtagcctctggaagcatcttcagaatcaatgccatggcctggtaccgccaggctccagggaagcagcgcgagttggtcgcggaaattactgctggtggtagcacaaactatgcagactccgtgaagggccgattcaccatctccgtagacaacgcctggaacacgctgtatctgcaaatgaacagcctgaaagttgaggacacggccgtctattactgtaatctagatcattatacgacatgggatagacggagtgcctactggggccaggggacccaggtcaccgtctcctcagcggccgcagaacaaaaactcatctcagaagaggatctgaatggggccgcacatcatcatcatcatcat

SEQ ID NO: 34 - DNA, 450 bp, Artificial Sequence
  Nanobody sequence
gaggtgcaattggtggagtctgggggaggcttggtgcaggctggggggtctctgagactctcctgtgcagcctctggattcactttcgatgattatgccataggctggttccgccaggccccagggaaggagcgtgagggggtctcatgtattagtagtagtgatggtagcacagtctatgcagactccgtgaagggccgattcaccatctccagtgacaacgccaagaacacggtgtatctgcaaatgaacagcctgaaacctgaggacacggccgtttattactgtgcagcagaacgacggaggggctatagcgatttatgtaggttttactacggcatggactactggggcaaagggacccaggtcaccgtctcctcagcggccgcagaacaaaaactcatctcagaagaggatctgaatggggccgcacatcatcatcatcatcat

SEQ ID NO: 35 - DNA, 444 bp, Artificial Sequence
  Nanobody sequence
gaggtgcaattggtggagtctgggggcggattgatgcaggctggggactctctgagactctcctgtgcagcctctggacgggccttcagtagctatgccttaggctggttccgccgggctccagggaaggagcgtgagtgtgtagcagcgactgaccggcttggtgataacacatactttccagattccgtgaagggccgattcaccatctccagagacaacgccaagaacacactgtatctacaaatgaacaaccttaagcctgaggacacggccgtttattactgcgcagcaggggccgttcggtacggtgttagtacgagtccgatgaactataactactggggccaggggacccaggtcaccgtctcctcagcggccgcagaacaaaaactcatctcagaagaggatctgaatggggccgcacatcatcatcatcatcat

SEQ ID NO: 36 - DNA, 450 bp, Artificial Sequence
  Nanobody sequence
gaggtgcaattggtggagtctgggggaggcttggtgcagcctggggggtctctgagactctcctgtgcagcctctggattcacttttgattattataccataggctggttccgccaggccccagggaaggagcgcgagggggtctcatgtattagtagtagggatggtgactcatactatgcagactccgtgaagggccgattcaccatctccagagacaacgccaagaacacggcgtatctgcaaatgaacagcctgaaacctgaggacacggccgtttattactgtgcagcatcagcttctgactacgggttggggttggagttgttccacgatgagtataactactggggccaggggacccaggtcaccgtctcctcagcggccgcagaacaaaaactcatctcagaagaggatctgaatggggccgcacatcatcatcatcatcat

SEQ ID NO: 37 - DNA, 444 bp, Artificial Sequence
  Nanobody sequence
gaggtgcaattggtggagtctgggggaggattggtgcaggctgggggctctctgagactctcctgtgcagcctctggacgcacgtactatctcaatgccatgggctggttccgccagggtccagggaaggaccgtgagtttgtagcagctatagactggagtgatggtaacaaagactatgcagactccgtgaagggccgattcaccatctccagagacaacgccaagaacacggtgtatctgcaaatgaacagcctgaaacctgaggacacggccgtttattactgtgcagccgacacaccaccctgggggcctatgatctacatcgaatcgtatgactcctggggccaggggacccaggtcaccgtctcctcagcggccgcagaacaaaaactcatctcagaagaggatctgaatggggccgcacatcatcatcatcatcat

SEQ ID NO: 38 - DNA, 450 bp, Artificial Sequence
  Nanobody sequence
gaggtgcaattggtggagtctgggggaggcttggtgcaggctggggggtctctgagactctcctgtgcagcctctggattcactttcgatggttatgccataggctggttccgccaggccccagggaaggagcgtgagggggtctcatgtattagtggtggtgatggccgctcatactatgcagactccgtgaagggccgattcaccgtctccagtgacaacgccaagaacacgctgtatctggaaatgaacagcctgaaacctgaggacacggccgtttattactgtgcagtcatatggggcccttactgtagcgactcgtatgagtatttgtatgagtatgactactggggccaggggacccaggtcaccgtctcctcagcggccgcagaacaaaaactcatctcagaagaggatctgaatggggccgcacatcatcatcatcatcat

SEQ ID NO: 39 - DNA, 450 bp, Artificial Sequence
  Nanobody sequence
gaggtgcaattggtggagtctgggggaggcttggtgcaggctggggggtctctgagactctcctgtgcagcctctggattcactttcgatgattataccataggctggttccgccaggccccagggaaggagcgtgaggagatctcatgtattagtaacaatgatggtagcacatactatacaaactccgtgaagggccgattcaccatctccagtgacaacgccaagaacacggtgtatctgcaaatgaacagcctgaaacctgaggacacggccgtttattactgtgcagcgtccccccatggctgctggtacgacctaataccccttcaggctgactttggttcctggggccaggggacccaggtcaccgtctcctcagcggccgcagaacaaaaactcatctcagaagaggatctgaatggggccgcacatcatcatcatcatcat

SEQ ID NO: 40 - DNA, 432 bp, Artificial Sequence
  Nanobody sequence
gaggtgcaattggtggagtctgggggagggttggtgcagcctggggggtctctgagactctcctgttcagcctctggaagcatcttcggtctcaatgccatgggctggtaccgccagactccagggaaggagcgcgagttggtcgcaggtattactagtattactagagttggtagtacaaggtatgcggactccgcgaagggccgattcaccatctccggagactacgccaagaacacggtgtatctgcaaatgaacagcctgaaacctgaggacacgggcgtttattactgtcggatgtcaatcgttaaaagtggtggtgctgactactggggtcaggggacccaggtcaccgtctcctcagcggccgcagaacaaaaactcatctcagaagaggatctgaatggggccgcacatcatcatcatcatcat

SEQ ID NO: 41 - DNA, 411 bp, Artificial Sequence
  Nanobody sequence
gaggtgcaattggtggagtctgggggaggcttggtgcagcctggggggtctctgaagctctcctgtgtagcctctggaagcatgttcagattctatcacatggcctggtaccgccaggctccaggggagcagcgcgagctggtcgcacgtatctatactggtggtgacacaatctatggagactccgtgctgggccgattcaccatctccagagacaattccaagaacacggtgtatctacaaatgaacaccctgaaacctgaggacacgggcgtctattactgtaatgccttcagggagtatcacatctggggccaggggacccaggtcaccgtctcctcagcggccgcagaacaaaaactcatctcagaagaggatctgaatggggccgcacatcatcatcatcatcat

SEQ ID NO: 42 - protein, 30 aa, Artificial Sequence
  Framework1 sequence
EVQLVESGGGLVQPGGSLRLSCVASGFTFS

SEQ ID NO: 43 - protein, 30 aa, Artificial Sequence
  Framework1 sequence
EVQLVESGGGLVQPGGSLRLSCAASGSIGG

SEQ ID NO: 44 - protein, 30 aa, Artificial Sequence
  Framework1 sequence
EVQLVESGGGLVQAGGSLRLSCAASGLTFG

SEQ ID NO: 45 - protein, 30 aa, Artificial Sequence
  Framework1 sequence
EVQLVESGGGLVQAGGSLRLSCAASGFTFS

SEQ ID NO: 46 - protein, 30 aa, Artificial Sequence
  Framework1 sequence
EVQLVESGGGLVQPGGSLRLSCAASGTLFK

SEQ ID NO: 47 - protein, 30 aa, Artificial Sequence; identical to SEQ ID NO: 46
  Framework1 sequence

SEQ ID NO: 48 - protein, 30 aa, Artificial Sequence
  Framework1 sequence
EVQLVESGGGLVQPGGSLGLSCVASGSIFR

SEQ ID NO: 49 - protein, 30 aa, Artificial Sequence
  Framework1 sequence
EVQLVESGGGLVQAGGSLRLSCAASGFTFD

SEQ ID NO: 50 - protein, 30 aa, Artificial Sequence
  Framework1 sequence
EVQLVESGGGLMQAGDSLRLSCAASGRAFS

SEQ ID NO: 51 - protein, 30 aa, Artificial Sequence
  Framework1 sequence
EVQLVESGGGLVQPGGSLRLSCAASGFTFD

SEQ ID NO: 52 - protein, 30 aa, Artificial Sequence
  Framework1 sequence
EVQLVESGGGLVQAGGSLRLSCAASGRTYY

SEQ ID NO: 53 - protein, 30 aa, Artificial Sequence; identical to SEQ ID NO: 49
  Framework1 sequence

SEQ ID NO: 54 - protein, 30 aa, Artificial Sequence; identical to SEQ ID NO: 49
  Framework1 sequence

SEQ ID NO: 55 - protein, 30 aa, Artificial Sequence
  Framework1 sequence
EVQLVESGGGLVQPGGSLRLSCSASGSIFG

SEQ ID NO: 56 - protein, 30 aa, Artificial Sequence
  Framework1 sequence
EVQLVESGGGLVQPGGSLKLSCVASGSMFR

SEQ ID NO: 57 - protein, 5 aa, Artificial Sequence
  CDR1 sequence
SYWMY

SEQ ID NO: 58 - protein, 5 aa, Artificial Sequence
  CDR1 sequence
LNAMA

SEQ ID NO: 59 - protein, 5 aa, Artificial Sequence
  CDR1 sequence
SAPMG

SEQ ID NO: 60 - protein, 5 aa, Artificial Sequence
  CDR1 sequence
SYPMS

SEQ ID NO: 61 - protein, 5 aa, Artificial Sequence
  CDR1 sequence
INAMG

SEQ ID NO: 62 - protein, 5 aa, Artificial Sequence
  CDR1 sequence
INAMG

SEQ ID NO: 63 - protein, 5 aa, Artificial Sequence
  CDR1 sequence
INAMA

SEQ ID NO: 64 - protein, 5 aa, Artificial Sequence
  CDR1 sequence
DYAIG

SEQ ID NO: 65 - protein, 5 aa, Artificial Sequence
  CDR1 sequence
SYALG

SEQ ID NO: 66 - protein, 5 aa, Artificial Sequence
  CDR1 sequence
YYTIG

SEQ ID NO: 67 - protein, 5 aa, Artificial Sequence
  CDR1 sequence
LNAMG

SEQ ID NO: 68 - protein, 5 aa, Artificial Sequence
  CDR1 sequence
GYAIG

SEQ ID NO: 69 - protein, 5 aa, Artificial Sequence
  CDR1 sequence
DYTIG

SEQ ID NO: 70 - protein, 5 aa, Artificial Sequence
  CDR1 sequence
LNAMG

SEQ ID NO: 71 - protein, 5 aa, Artificial Sequence
  CDR1 sequence
FYHMA

SEQ ID NO: 72 - protein, 14 aa, Artificial Sequence
  Framework2 sequence
WVRQAPGKGVEWVS

SEQ ID NO: 73 - protein, 14 aa, Artificial Sequence
  Framework2 sequence
WYRQAPGKERELVA

SEQ ID NO: 74 - protein, 14 aa, Artificial Sequence
  Framework2 sequence
WYRQAPGKERELVA

SEQ ID NO: 75 - protein, 14 aa, Artificial Sequence
  Framework2 sequence
WVRQAPGKGPAWVS

SEQ ID NO: 76 - protein, 14 aa, Artificial Sequence
  Framework2 sequence
WYRQAPGKRRELVA

SEQ ID NO: 77 - protein, 14 aa, Artificial Sequence
  Framework2 sequence
WYRQAPGKQRELVA

SEQ ID NO: 78 - protein, 14 aa, Artificial Sequence
  Framework2 sequence
WYRQAPGKQRELVA

SEQ ID NO: 79 - protein, 14 aa, Artificial Sequence
  Framework2 sequence
WFRQAPGKEREGVS

SEQ ID NO: 80 - protein, 14 aa, Artificial Sequence
  Framework2 sequence
WFRRAPGKERECVA

SEQ ID NO: 81 - protein, 14 aa, Artificial Sequence
  Framework2 sequence
WFRQAPGKEREGVS

SEQ ID NO: 82 - protein, 14 aa, Artificial Sequence
  Framework2 sequence
WFRQGPGKDREFVA

SEQ ID NO: 83 - protein, 14 aa, Artificial Sequence
  Framework2 sequence
WFRQAPGKEREGVS

SEQ ID NO: 84 - protein, 14 aa, Artificial Sequence
  Framework2 sequence
WFRQAPGKEREEIS

SEQ ID NO: 85 - protein, 14 aa, Artificial Sequence
  Framework2 sequence
WYRQTPGKERELVA

SEQ ID NO: 86 - protein, 14 aa, Artificial Sequence
  Framework2 sequence
WYRQAPGEQRELVA

SEQ ID NO: 87 - protein, 16 aa, Artificial Sequence
  CDR2 sequence
AISPGGVERYTDSVKG

SEQ ID NO: 88 - protein, 16 aa, Artificial Sequence
  CDR2 sequence
GIFGVGSTRYADSVKG

SEQ ID NO: 89 - protein, 16 aa, Artificial Sequence
  CDR2 sequence
YISGDERIWYGDSVKG

SEQ ID NO: 90 - protein, 17 aa, Artificial Sequence
  CDR2 sequence
TVSPGGITTSYADSVKG

SEQ ID NO: 91 - protein, 16 aa, Artificial Sequence
  CDR2 sequence
LITSSDTTDYAESVEG

SEQ ID NO: 92 - protein, 16 aa, Artificial Sequence
  CDR2 sequence
LITSSDTTDYAESVEG

SEQ ID NO: 93 - protein, 16 aa, Artificial Sequence
  CDR2 sequence
EITAGGSTNYADSVKG

SEQ ID NO: 94 - protein, 17 aa, Artificial Sequence
  CDR2 sequence
CISSSDGSTVYADSVKG

SEQ ID NO: 95 - protein, 17 aa, Artificial Sequence
  CDR2 sequence
ATDRLGDNTYFPDSVKG

SEQ ID NO: 96 - protein, 17 aa, Artificial Sequence
  CDR2 sequence
CISSRDGDSYYADSVKG

SEQ ID NO: 97 - protein, 17 aa, Artificial Sequence
  CDR2 sequence
AIDWSDGNKDYADSVKG

SEQ ID NO: 98 - protein, 17 aa, Artificial Sequence
  CDR2 sequence
CISGGDGRSYYADSVKG

SEQ ID NO: 99 - protein, 17 aa, Artificial Sequence
  CDR2 sequence
CISNNDGSTYYTNSVKG

SEQ ID NO: 100 - protein, 19 aa, Artificial Sequence
  CDR2 sequence
GITSITRVGSTRYADSAKG

SEQ ID NO: 101 - protein, 16 aa, Artificial Sequence
  CDR2 sequence
RIYTGGDTIYGDSVLG

SEQ ID NO: 102 - protein, 32 aa, Artificial Sequence
  Framework3 sequence
RFTISRDNAKNTLYLQMNSLKSEDTAMYYCAR

SEQ ID NO: 103 - protein, 32 aa, Artificial Sequence
  Framework3 sequence
RFTISRDIAKNTVFLQMNSLNSEDTAVYYCRM

SEQ ID NO: 104 - protein, 32 aa, Artificial Sequence
  Framework3 sequence
RFTISRDTTKNTLYLQMNSLKPEDTAVYYCVS

SEQ ID NO: 105 - protein, 32 aa, Artificial Sequence
  Framework3 sequence
RFTISRDNAKNTLYLQMNSLKPEDTAVYYCLR

SEQ ID NO: 106 - protein, 32 aa, Artificial Sequence
  Framework3 sequence
RFTISRDNTWNAVYLQMNSLKPEDTAVYYCHS

SEQ ID NO: 107 - protein, 32 aa, Artificial Sequence; identical to SEQ ID NO: 106
  Framework3 sequence

SEQ ID NO: 108 - protein, 32 aa, Artificial Sequence
  Framework3 sequence
RFTISVDNAWNTLYLQMNSLKVEDTAVYYCNL

SEQ ID NO: 109 - protein, 32 aa, Artificial Sequence
  Framework3 sequence
RFTISSDNAKNTVYLQMNSLKPEDTAVYYCAA

SEQ ID NO: 110 - protein, 32 aa, Artificial Sequence
  Framework3 sequence
RFTISRDNAKNTLYLQMNNLKPEDTAVYYCAA

SEQ ID NO: 111 - protein, 32 aa, Artificial Sequence
  Framework3 sequence
RFTISRDNAKNTAYLQMNSLKPEDTAVYYCAA

SEQ ID NO: 112 - protein, 32 aa, Artificial Sequence
  Framework3 sequence
RFTISRDNAKNTVYLQMNSLKPEDTAVYYCAA

SEQ ID NO: 113 - protein, 32 aa, Artificial Sequence
  Framework3 sequence
RFTVSSDNAKNTLYLEMNSLKPEDTAVYYCAV

SEQ ID NO: 114 - protein, 32 aa, Artificial Sequence; identical to SEQ ID NO: 109
  Framework3 sequence

SEQ ID NO: 115 - protein, 32 aa, Artificial Sequence
  Framework3 sequence
RFTISGDYAKNTVYLQMNSLKPEDTGVYYCRM

SEQ ID NO: 116 - protein, 32 aa, Artificial Sequence
  Framework3 sequence
RFTISRDNSKNTVYLQMNTLKPEDTGVYYCNA

SEQ ID NO: 117 - protein, 7 aa, Artificial Sequence
  CDR3 sequence
LTSFATP

SEQ ID NO: 118 - protein, 10 aa, Artificial Sequence
  CDR3 sequence
SSVTRGSSDY

SEQ ID NO: 119 - protein, 6 aa, Artificial Sequence
  CDR3 sequence
DVKVRH

SEQ ID NO: 120 - protein, 4 aa, Artificial Sequence
  CDR3 sequence
DLNN

SEQ ID NO: 121 - protein, 14 aa, Artificial Sequence
  CDR3 sequence
DHYSMGVPEKRVIM

SEQ ID NO: 122 - protein, 14 aa, Artificial Sequence
  CDR3 sequence
DHYSMGVPEKRVIM

SEQ ID NO: 123 - protein, 12 aa, Artificial Sequence
  CDR3 sequence
DHYTTWDRRSAY

SEQ ID NO: 124 - protein, 18 aa, Artificial Sequence
  CDR3 sequence
ERRRGYSDLCRFYYGMDY

SEQ ID NO: 125 - protein, 16 aa, Artificial Sequence
  CDR3 sequence
GAVRYGVSTSPMNYNY

SEQ ID NO: 126 - protein, 18 aa, Artificial Sequence
  CDR3 sequence
SASDYGLGLELFHDEYNY

SEQ ID NO: 127 - protein, 16 aa, Artificial Sequence
  CDR3 sequence
DTPPWGPMIYIESYDS

SEQ ID NO: 128 - protein, 18 aa, Artificial Sequence
  CDR3 sequence
IWGPYCSDSYEYLYEYDY

SEQ ID NO: 129 - protein, 18 aa, Artificial Sequence
  CDR3 sequence
SPHGCWYDLIPLQADFGS

SEQ ID NO: 130 - protein, 10 aa, Artificial Sequence
  CDR3 sequence
SIVKSGGADY

SEQ ID NO: 131 - protein, 6 aa, Artificial Sequence
  CDR3 sequence
FREYHI

SEQ ID NO: 132 - protein, 11 aa, Artificial Sequence
  Framework4 sequence
ESQGTQVTVSS

SEQ ID NO: 133 - protein, 11 aa, Artificial Sequence
  Framework4 sequence
WGQGTQVTVSS

SEQ ID NO: 134 - protein, 11 aa, Artificial Sequence
  Framework4 sequence
WGQGTQVTVSS

SEQ ID NO: 135 - protein, 11 aa, Artificial Sequence
  Framework4 sequence
RGQGTQVTVSS

SEQ ID NO: 136 - protein, 11 aa, Artificial Sequence
  Framework4 sequence
YGQGTQVTVSS

SEQ ID NO: 137 - protein, 11 aa, Artificial Sequence
  Framework4 sequence
YGQGTQVTVSS

SEQ ID NO: 138 - protein, 11 aa, Artificial Sequence
  Framework4 sequence
WGQGTQVTVSS

SEQ ID NO: 139 - protein, 11 aa, Artificial Sequence
  Framework4 sequence
WGKGTQVTVSS

SEQ ID NO: 140 - protein, 11 aa, Artificial Sequence
  Framework4 sequence
WGQGTQVTVSS

SEQ ID NO: 141 - protein, 11 aa, Artificial Sequence
  Framework4 sequence
WGQGTQVTVSS

SEQ ID NO: 142 - protein, 11 aa, Artificial Sequence
  Framework4 sequence
WGQGTQVTVSS

SEQ ID NO: 143 - protein, 11 aa, Artificial Sequence
  Framework4 sequence
WGQGTQVTVSS

SEQ ID NO: 144 - protein, 11 aa, Artificial Sequence
  Framework4 sequence
WGQGTQVTVSS

SEQ ID NO: 145 - protein, 11 aa, Artificial Sequence
  Framework4 sequence
WGQGTQVTVSS

SEQ ID NO: 146 - protein, 11 aa, Artificial Sequence
  Framework4 sequence
WGQGTQVTVSS

SEQ ID NO: 147 - protein, 409 aa, Artificial Sequence
  Nanobody sequence
EVQLVESGGGLMQAGDSLRLSCAASGRAFSSYALGWFRRAPGKEREFVAATDRLGDNTYFPDSVKGRFTISRDNAKNTLYLQMNNLKPEDTAVYYCAAGAVRYGVSTSPMNYNYWGQGTLVTVSSGGGGSGGGGSGGGGSGGGGSGGGGSGGGGSGGGGSEVQLVESGGGLMQAGDSLRLSCAASGRAFSSYALGWFRRAPGKEREFVAATDRLGDNTYFPDSVKGRFTISRDNAKNTLYLQMNNLKPEDTAVYYCAAGAVRYGVSTSPMNYNYWGQGTLVTVSSGGGGSGGGSEVQLVESGGGLVQPGNSLRLSCAASGFTFSSFGMSWVRQAPGKGLEWVSSISGSGSDTLYADSVKGRFTISRDNAKTTLYLQMNSLRPEDTAVYYCTIGGSLSRSSQGTLVTVSS

SEQ ID NO: 148 - protein, 399 aa, Artificial Sequence
  Nanobody sequence
EVQLVESGGGLMQAGDSLRLSCAASGRAFSSYALGWFRRAPGKEREFVAATDRLGDNTYFPDSVKGRFTISRDNAKNTLYLQMNNLKPEDTAVYYCAAGAVRYGVSTSPMNYNYWGQGTLVTVSSGGGGSGGGGSGGGGSGGGGSGGGGSGGGGSGGGGSEVQLVESGGGLVQPGGSLRLSCVASGFTFSSYWMYWVRQAPGKGVEWVSAISPGGVERYTDSVKGRFTISRDNAKNTLYLQMNSLKSEDTAMYYCARLTSFATPESQGTLVTVSSGGGGSGGGSEVQLVESGGGLVQPGNSLRLSCAASGFTFSSFGMSWVRQAPGKGLEWVSSISGSGSDTLYADSVKGRFTISRDNAKTTLYLQMNSLRPEDTAVYYCTIGGSLSRSSQGTLVTVSS

SEQ ID NO: 149 - protein, 409 aa, Artificial Sequence
  Nanobody sequence
EVQLVESGGGLMQAGDSLRLSCAASGRAFSSYALGWFRRAPGKEREFVAATDRLGDNTYFPDSVKGRFTISRDNAKNTLYLQMNNLKPEDTAVYYCAAGAVRYGVSTSPMNYNYWGQGTLVTVSSGGGGSGGGGSGGGGSGGGGSGGGGSGGGGSGGGGSEVQLVESGGGLVQAGGSLRLSCAASGRTYYLNAMGWFRQGPGKDREFVAAIDWSDGNKDYADSVKGRFTISRDNAKNTVYLQMNSLKPEDTAVYYCAADTPPWGPMIYIESYDSWGQGTLVTVSSGGGGSGGGSEVQLVESGGGLVQPGNSLRLSCAASGFTFSSFGMSWVRQAPGKGLEWVSSISGSGSDTLYADSVKGRFTISRDNAKTTLYLQMNSLRPEDTAVYYCTIGGSLSRSSQGTLVTVSS

SEQ ID NO: 150 - protein, 397 aa, Artificial Sequence
  Nanobody sequence
EVQLVESGGGLMQAGDSLRLSCAASGRAFSSYALGWFRRAPGKEREFVAATDRLGDNTYFPDSVKGRFTISRDNAKNTLYLQMNNLKPEDTAVYYCAAGAVRYGVSTSPMNYNYWGQGTLVTVSSGGGGSGGGGSGGGGSGGGGSGGGGSGGGGSGGGGSEVQLVESGGGLVQAGGSLRLSCAASGFTFSSYPMSWVRQAPGKGPAWVSTVSPGGITTSYADSVKGRFTISRDNAKNTLYLQMNSLKPEDTAVYYCLRDLNNRGQGTLVTVSSGGGGSGGGSEVQLVESGGGLVQPGNSLRLSCAASGFTFSSFGMSWVRQAPGKGLEWVSSISGSGSDTLYADSVKGRFTISRDNAKTTLYLQMNSLRPEDTAVYYCTIGGSLSRSSQGTLVTVSS

SEQ ID NO: 151 - protein, 399 aa, Artificial Sequence
  Nanobody sequence
EVQLVESGGGLVQPGGSLRLSCVASGFTFSSYWMYWVRQAPGKGVEWVSAISPGGVERYTDSVKGRFTISRDNAKNTLYLQMNSLKSEDTAMYYCARLTSFATPESQGTLVTVSSGGGGSGGGGSGGGGSGGGGSGGGGSGGGGSGGGGSEVQLVESGGGLMQAGDSLRLSCAASGRAFSSYALGWFRRAPGKEREFVAATDRLGDNTYFPDSVKGRFTISRDNAKNTLYLQMNNLKPEDTAVYYCAAGAVRYGVSTSPMNYNYWGQGTLVTVSSGGGGSGGGSEVQLVESGGGLVQPGNSLRLSCAASGFTFSSFGMSWVRQAPGKGLEWVSSISGSGSDTLYADSVKGRFTISRDNAKTTLYLQMNSLRPEDTAVYYCTIGGSLSRSSQGTLVTVSS

SEQ ID NO: 152 - protein, 389 aa, Artificial Sequence
  Nanobody sequence
EVQLVESGGGLVQPGGSLRLSCVASGFTFSSYWMYWVRQAPGKGVEWVSAISPGGVERYTDSVKGRFTISRDNAKNTLYLQMNSLKSEDTAMYYCARLTSFATPESQGTLVTVSSGGGGSGGGGSGGGGSGGGGSGGGGSGGGGSGGGGSEVQLVESGGGLVQPGGSLRLSCVASGFTFSSYWMYWVRQAPGKGVEWVSAISPGGVERYTDSVKGRFTISRDNAKNTLYLQMNSLKSEDTAMYYCARLTSFATPESQGTLVTVSSGGGGSGGGSEVQLVESGGGLVQPGNSLRLSCAASGFTFSSFGMSWVRQAPGKGLEWVSSISGSGSDTLYADSVKGRFTISRDNAKTTLYLQMNSLRPEDTAVYYCTIGGSLSRSSQGTLVTVSS

SEQ ID NO: 153 - protein, 399 aa, Artificial Sequence
  Nanobody sequence
EVQLVESGGGLVQPGGSLRLSCVASGFTFSSYWMYWVRQAPGKGVEWVSAISPGGVERYTDSVKGRFTISRDNAKNTLYLQMNSLKSEDTAMYYCARLTSFATPESQGTLVTVSSGGGGSGGGGSGGGGSGGGGSGGGGSGGGGSGGGGSEVQLVESGGGLVQAGGSLRLSCAASGRTYYLNAMGWFRQGPGKDREFVAAIDWSDGNKDYADSVKGRFTISRDNAKNTVYLQMNSLKPEDTAVYYCAADTPPWGPMIYIESYDSWGQGTLVTVSSGGGGSGGGSEVQLVESGGGLVQPGNSLRLSCAASGFTFSSFGMSWVRQAPGKGLEWVSSISGSGSDTLYADSVKGRFTISRDNAKTTLYLQMNSLRPEDTAVYYCTIGGSLSRSSQGTLVTVSS

SEQ ID NO: 154 - protein, 394 aa, Artificial Sequence
  Nanobody sequence
EVQLVESGGGLVQPGGSLRLSCVASGFTFSSYWMYWVRQAPGKGVEWVSAISPGGVERYTDSVKGRFTISRDNAKNTLYLQMNSLKSEDTAMYYCARLTSFATPESQGTLVTVSSGGGGSGGGGSGGGGSGGGGSGGGGSGGGGSGGGGSEVQLVESGGGLVQPGGSLGLSCVASGSIFRINAMAWYRQAPGKQRELVAEITAGGSTNYADSVKGRFTISVDNAWNTLYLQMNSLKVEDTAVYYCNLDHYTTWDRRSAYWGQGTLVTVSSGGGGSGGGSEVQLVESGGGLVQPGNSLRLSCAASGFTFSSFGMSWVRQAPGKGLEWVSSISGSGSDTLYADSVKGRFTISRDNAKTTLYLQMNSLRPEDTAVYYCTIGGSLSRSSQGTLVTVSS

SEQ ID NO: 155 - protein, 409 aa, Artificial Sequence
  Nanobody sequence
EVQLVESGGGLVQAGGSLRLSCAASGRTYYLNAMGWFRQGPGKDREFVAAIDWSDGNKDYADSVKGRFTISRDNAKNTVYLQMNSLKPEDTAVYYCAADTPPWGPMIYIESYDSWGQGTLVTVSSGGGGSGGGGSGGGGSGGGGSGGGGSGGGGSGGGGSEVQLVESGGGLMQAGDSLRLSCAASGRAFSSYALGWFRRAPGKEREFVAATDRLGDNTYFPDSVKGRFTISRDNAKNTLYLQMNNLKPEDTAVYYCAAGAVRYGVSTSPMNYNYWGQGTLVTVSSGGGGSGGGSEVQLVESGGGLVQPGNSLRLSCAASGFTFSSFGMSWVRQAPGKGLEWVSSISGSGSDTLYADSVKGRFTISRDNAKTTLYLQMNSLRPEDTAVYYCTIGGSLSRSSQGTLVTVSS

SEQ ID NO: 156 - protein, 399 aa, Artificial Sequence
  Nanobody sequence
EVQLVESGGGLVQAGGSLRLSCAASGRTYYLNAMGWFRQGPGKDREFVAAIDWSDGNKDYADSVKGRFTISRDNAKNTVYLQMNSLKPEDTAVYYCAADTPPWGPMIYIESYDSWGQGTLVTVSSGGGGSGGGGSGGGGSGGGGSGGGGSGGGGSGGGGSEVQLVESGGGLVQPGGSLRLSCVASGFTFSSYWMYWVRQAPGKGVEWVSAISPGGVERYTDSVKGRFTISRDNAKNTLYLQMNSLKSEDTAMYYCARLTSFATPESQGTLVTVSSGGGGSGGGSEVQLVESGGGLVQPGNSLRLSCAASGFTFSSFGMSWVRQAPGKGLEWVSSISGSGSDTLYADSVKGRFTISRDNAKTTLYLQMNSLRPEDTAVYYCTIGGSLSRSSQGTLVTVSS

SEQ ID NO: 157 - protein, 409 aa, Artificial Sequence
  Nanobody sequence
EVQLVESGGGLVQAGGSLRLSCAASGRTYYLNAMGWFRQGPGKDREFVAAIDWSDGNKDYADSVKGRFTISRDNAKNTVYLQMNSLKPEDTAVYYCAADTPPWGPMIYIESYDSWGQGTLVTVSSGGGGSGGGGSGGGGSGGGGSGGGGSGGGGSGGGGSEVQLVESGGGLVQAGGSLRLSCAASGRTYYLNAMGWFRQGPGKDREFVAAIDWSDGNKDYADSVKGRFTISRDNAKNTVYLQMNSLKPEDTAVYYCAADTPPWGPMIYIESYDSWGQGTLVTVSSGGGGSGGGSEVQLVESGGGLVQPGNSLRLSCAASGFTFSSFGMSWVRQAPGKGLEWVSSISGSGSDTLYADSVKGRFTISRDNAKTTLYLQMNSLRPEDTAVYYCTIGGSLSRSSQGTLVTVSS

SEQ ID NO: 158 - protein, 404 aa, Artificial Sequence
  Nanobody sequence
EVQLVESGGGLVQAGGSLRLSCAASGRTYYLNAMGWFRQGPGKDREFVAAIDWSDGNKDYADSVKGRFTISRDNAKNTVYLQMNSLKPEDTAVYYCAADTPPWGPMIYIESYDSWGQGTLVTVSSGGGGSGGGGSGGGGSGGGGSGGGGSGGGGSGGGGSEVQLVESGGGLVQPGGSLGLSCVASGSIFRINAMAWYRQAPGKQRELVAEITAGGSTNYADSVKGRFTISVDNAWNTLYLQMNSLKVEDTAVYYCNLDHYTTWDRRSAYWGQGTLVTVSSGGGGSGGGSEVQLVESGGGLVQPGNSLRLSCAASGFTFSSFGMSWVRQAPGKGLEWVSSISGSGSDTLYADSVKGRFTISRDNAKTTLYLQMNSLRPEDTAVYYCTIGGSLSRSSQGTLVTVSS

SEQ ID NO: 159 - protein, 397 aa, Artificial Sequence
  Nanobody sequence
EVQLVESGGGLVQAGGSLRLSCAASGRTYYLNAMGWFRQGPGKDREFVAAIDWSDGNKDYADSVKGRFTISRDNAKNTVYLQMNSLKPEDTAVYYCAADTPPWGPMIYIESYDSWGQGTLVTVSSGGGGSGGGGSGGGGSGGGGSGGGGSGGGGSGGGGSEVQLVESGGGLVQAGGSLRLSCAASGFTFSSYPMSWVRQAPGKGPAWVSTVSPGGITTSYADSVKGRFTISRDNAKNTLYLQMNSLKPEDTAVYYCLRDLNNRGQGTLVTVSSGGGGSGGGSEVQLVESGGGLVQPGNSLRLSCAASGFTFSSFGMSWVRQAPGKGLEWVSSISGSGSDTLYADSVKGRFTISRDNAKTTLYLQMNSLRPEDTAVYYCTIGGSLSRSSQGTLVTVSS

SEQ ID NO: 160 - protein, 394 aa, Artificial Sequence
  Nanobody sequence
EVQLVESGGGLVQPGGSLGLSCVASGSIFRINAMAWYRQAPGKQRELVAEITAGGSTNYADSVKGRFTISVDNAWNTLYLQMNSLKVEDTAVYYCNLDHYTTWDRRSAYWGQGTLVTVSSGGGGSGGGGSGGGGSGGGGSGGGGSGGGGSGGGGSEVQLVESGGGLVQPGGSLRLSCVASGFTFSSYWMYWVRQAPGKGVEWVSAISPGGVERYTDSVKGRFTISRDNAKNTLYLQMNSLKSEDTAMYYCARLTSFATPESQGTLVTVSSGGGGSGGGSEVQLVESGGGLVQPGNSLRLSCAASGFTFSSFGMSWVRQAPGKGLEWVSSISGSGSDTLYADSVKGRFTISRDNAKTTLYLQMNSLRPEDTAVYYCTIGGSLSRSSQGTLVTVSS

SEQ ID NO: 161 - protein, 404 aa, Artificial Sequence
  Nanobody sequence
EVQLVESGGGLVQPGGSLGLSCVASGSIFRINAMAWYRQAPGKQRELVAEITAGGSTNYADSVKGRFTISVDNAWNTLYLQMNSLKVEDTAVYYCNLDHYTTWDRRSAYWGQGTLVTVSSGGGGSGGGGSGGGGSGGGGSGGGGSGGGGSGGGGSEVQLVESGGGLVQAGGSLRLSCAASGRTYYLNAMGWFRQGPGKDREFVAAIDWSDGNKDYADSVKGRFTISRDNAKNTVYLQMNSLKPEDTAVYYCAADTPPWGPMIYIESYDSWGQGTLVTVSSGGGGSGGGSEVQLVESGGGLVQPGNSLRLSCAASGFTFSSFGMSWVRQAPGKGLEWVSSISGSGSDTLYADSVKGRFTISRDNAKTTLYLQMNSLRPEDTAVYYCTIGGSLSRSSQGTLVTVSS

SEQ ID NO: 162 - protein, 399 aa, Artificial Sequence
  Nanobody sequence
EVQLVESGGGLVQPGGSLGLSCVASGSIFRINAMAWYRQAPGKQRELVAEITAGGSTNYADSVKGRFTISVDNAWNTLYLQMNSLKVEDTAVYYCNLDHYTTWDRRSAYWGQGTLVTVSSGGGGSGGGGSGGGGSGGGGSGGGGSGGGGSGGGGSEVQLVESGGGLVQPGGSLGLSCVASGSIFRINAMAWYRQAPGKQRELVAEITAGGSTNYADSVKGRFTISVDNAWNTLYLQMNSLKVEDTAVYYCNLDHYTTWDRRSAYWGQGTLVTVSSGGGGSGGGSEVQLVESGGGLVQPGNSLRLSCAASGFTFSSFGMSWVRQAPGKGLEWVSSISGSGSDTLYADSVKGRFTISRDNAKTTLYLQMNSLRPEDTAVYYCTIGGSLSRSSQGTLVTVSS

SEQ ID NO: 163 - protein, 392 aa, Artificial Sequence
  Nanobody sequence
EVQLVESGGGLVQPGGSLGLSCVASGSIFRINAMAWYRQAPGKQRELVAEITAGGSTNYADSVKGRFTISVDNAWNTLYLQMNSLKVEDTAVYYCNLDHYTTWDRRSAYWGQGTLVTVSSGGGGSGGGGSGGGGSGGGGSGGGGSGGGGSGGGGSEVQLVESGGGLVQAGGSLRLSCAASGFTFSSYPMSWVRQAPGKGPAWVSTVSPGGITTSYADSVKGRFTISRDNAKNTLYLQMNSLKPEDTAVYYCLRDLNNRGQGTLVTVSSGGGGSGGGSEVQLVESGGGLVQPGNSLRLSCAASGFTFSSFGMSWVRQAPGKGLEWVSSISGSGSDTLYADSVKGRFTISRDNAKTTLYLQMNSLRPEDTAVYYCTIGGSLSRSSQGTLVTVSS

SEQ ID NO: 164 - protein, 397 aa, Artificial Sequence
  Nanobody sequence
EVQLVESGGGLVQAGGSLRLSCAASGFTFSSYPMSWVRQAPGKGPAWVSTVSPGGITTSYADSVKGRFTISRDNAKNTLYLQMNSLKPEDTAVYYCLRDLNNRGQGTLVTVSSGGGGSGGGGSGGGGSGGGGSGGGGSGGGGSGGGGSEVQLVESGGGLMQAGDSLRLSCAASGRAFSSYALGWFRRAPGKEREFVAATDRLGDNTYFPDSVKGRFTISRDNAKNTLYLQMNNLKPEDTAVYYCAAGAVRYGVSTSPMNYNYWGQGTLVTVSSGGGGSGGGSEVQLVESGGGLVQPGNSLRLSCAASGFTFSSFGMSWVRQAPGKGLEWVSSISGSGSDTLYADSVKGRFTISRDNAKTTLYLQMNSLRPEDTAVYYCTIGGSLSRSSQGTLVTVSS

SEQ ID NO: 165 - protein, 397 aa, Artificial Sequence
  Nanobody sequence
EVQLVESGGGLVQAGGSLRLSCAASGFTFSSYPMSWVRQAPGKGPAWVSTVSPGGITTSYADSVKGRFTISRDNAKNTLYLQMNSLKPEDTAVYYCLRDLNNRGQGTLVTVSSGGGGSGGGGSGGGGSGGGGSGGGGSGGGGSGGGGSEVQLVESGGGLVQAGGSLRLSCAASGRTYYLNAMGWFRQGPGKDREFVAAIDWSDGNKDYADSVKGRFTISRDNAKNTVYLQMNSLKPEDTAVYYCAADTPPWGPMIYIESYDSWGQGTLVTVSSGGGGSGGGSEVQLVESGGGLVQPGNSLRLSCAASGFTFSSFGMSWVRQAPGKGLEWVSSISGSGSDTLYADSVKGRFTISRDNAKTTLYLQMNSLRPEDTAVYYCTIGGSLSRSSQGTLVTVSS

SEQ ID NO: 166 - protein, 392 aa, Artificial Sequence
  Nanobody sequence
EVQLVESGGGLVQAGGSLRLSCAASGFTFSSYPMSWVRQAPGKGPAWVSTVSPGGITTSYADSVKGRFTISRDNAKNTLYLQMNSLKPEDTAVYYCLRDLNNRGQGTLVTVSSGGGGSGGGGSGGGGSGGGGSGGGGSGGGGSGGGGSEVQLVESGGGLVQPGGSLGLSCVASGSIFRINAMAWYRQAPGKQRELVAEITAGGSTNYADSVKGRFTISVDNAWNTLYLQMNSLKVEDTAVYYCNLDHYTTWDRRSAYWGQGTLVTVSSGGGGSGGGSEVQLVESGGGLVQPGNSLRLSCAASGFTFSSFGMSWVRQAPGKGLEWVSSISGSGSDTLYADSVKGRFTISRDNAKTTLYLQMNSLRPEDTAVYYCTIGGSLSRSSQGTLVTVSS

SEQ ID NO: 167 - protein, 385 aa, Artificial Sequence
  Nanobody sequence
EVQLVESGGGLVQAGGSLRLSCAASGFTFSSYPMSWVRQAPGKGPAWVSTVSPGGITTSYADSVKGRFTISRDNAKNTLYLQMNSLKPEDTAVYYCLRDLNNRGQGTLVTVSSGGGGSGGGGSGGGGSGGGGSGGGGSGGGGSGGGGSEVQLVESGGGLVQAGGSLRLSCAASGFTFSSYPMSWVRQAPGKGPAWVSTVSPGGITTSYADSVKGRFTISRDNAKNTLYLQMNSLKPEDTAVYYCLRDLNNRGQGTLVTVSSGGGGSGGGSEVQLVESGGGLVQPGNSLRLSCAASGFTFSSFGMSWVRQAPGKGLEWVSSISGSGSDTLYADSVKGRFTISRDNAKTTLYLQMNSLRPEDTAVYYCTIGGSLSRSSQGTLVTVSS

SEQ ID NO: 168 - protein, 396 aa, Artificial Sequence
  Nanobody sequence
EVQLVESGGGLVQPGGSLRLSCVASGFTFSSYWMYWVRQAPGKGVEWVSAISPGGVERYTDSVKGRFTISRDNAKNTLYLQMNSLKSEDTAMYYCARLTSFATPESQGTLVTVSSGGGGSGGGGSGGGGSGGGGSGGGGSGGGGSGGGGSEVQLVESGGGLVQPGGSLRLSCAASGTLFKINAMGWYRQAPGKRRELVALITSSDTTDYAESVEGRFTISRDNTWNAVYLQMNSLKPEDTAVYYCHSDHYSMGVPEKRVIMYGQGTLVTVSSGGGGSGGGSEVQLVESGGGLVQPGNSLRLSCAASGFTFSSFGMSWVRQAPGKGLEWVSSISGSGSDTLYADSVKGRFTISRDNAKTTLYLQMNSLRPEDTAVYYCTIGGSLSRSSQGTLVTVSS

SEQ ID NO: 169 - protein, 406 aa, Artificial Sequence
  Nanobody sequence
EVQLVESGGGLVQAGGSLRLSCAASGRTYYLNAMGWFRQGPGKDREFVAAIDWSDGNKDYADSVKGRFTISRDNAKNTVYLQMNSLKPEDTAVYYCAADTPPWGPMIYIESYDSWGQGTLVTVSSGGGGSGGGGSGGGGSGGGGSGGGGSGGGGSGGGGSEVQLVESGGGLVQPGGSLRLSCAASGTLFKINAMGWYRQAPGKRRELVALITSSDTTDYAESVEGRFTISRDNTWNAVYLQMNSLKPEDTAVYYCHSDHYSMGVPEKRVIMYGQGTLVTVSSGGGGSGGGSEVQLVESGGGLVQPGNSLRLSCAASGFTFSSFGMSWVRQAPGKGLEWVSSISGSGSDTLYADSVKGRFTISRDNAKTTLYLQMNSLRPEDTAVYYCTIGGSLSRSSQGTLVTVSS

SEQ ID NO: 170 - protein, 394 aa, Artificial Sequence
  Nanobody sequence
EVQLVESGGGLVQAGGSLRLSCAASGFTFSSYPMSWVRQAPGKGPAWVSTVSPGGITTSYADSVKGRFTISRDNAKNTLYLQMNSLKPEDTAVYYCLRDLNNRGQGTLVTVSSGGGGSGGGGSGGGGSGGGGSGGGGSGGGGSGGGGSEVQLVESGGGLVQPGGSLRLSCAASGTLFKINAMGWYRQAPGKRRELVALITSSDTTDYAESVEGRFTISRDNTWNAVYLQMNSLKPEDTAVYYCHSDHYSMGVPEKRVIMYGQGTLVTVSSGGGGSGGGSEVQLVESGGGLVQPGNSLRLSCAASGFTFSSFGMSWVRQAPGKGLEWVSSISGSGSDTLYADSVKGRFTISRDNAKTTLYLQMNSLRPEDTAVYYCTIGGSLSRSSQGTLVTVSS

SEQ ID NO: 171 - protein, 396 aa, Artificial Sequence
  Nanobody sequence
EVQLVESGGGLVQPGGSLRLSCAASGTLFKINAMGWYRQAPGKRRELVALITSSDTTDYAESVEGRFTISRDNTWNAVYLQMNSLKPEDTAVYYCHSDHYSMGVPEKRVIMYGQGTLVTVSSGGGGSGGGGSGGGGSGGGGSGGGGSGGGGSGGGGSEVQLVESGGGLVQPGGSLRLSCVASGFTFSSYWMYWVRQAPGKGVEWVSAISPGGVERYTDSVKGRFTISRDNAKNTLYLQMNSLKSEDTAMYYCARLTSFATPESQGTLVTVSSGGGGSGGGSEVQLVESGGGLVQPGNSLRLSCAASGFTFSSFGMSWVRQAPGKGLEWVSSISGSGSDTLYADSVKGRFTISRDNAKTTLYLQMNSLRPEDTAVYYCTIGGSLSRSSQGTLVTVSS

SEQ ID NO: 172 - protein, 403 aa, Artificial Sequence
  Nanobody sequence
EVQLVESGGGLVQPGGSLRLSCAASGTLFKINAMGWYRQAPGKRRELVALITSSDTTDYAESVEGRFTISRDNTWNAVYLQMNSLKPEDTAVYYCHSDHYSMGVPEKRVIMYGQGTLVTVSSGGGGSGGGGSGGGGSGGGGSGGGGSGGGGSGGGGSEVQLVESGGGLVQPGGSLRLSCAASGTLFKINAMGWYRQAPGKRRELVALITSSDTTDYAESVEGRFTISRDNTWNAVYLQMNSLKPEDTAVYYCHSDHYSMGVPEKRVIMYGQGTLVTVSSGGGGSGGGSEVQLVESGGGLVQPGNSLRLSCAASGFTFSSFGMSWVRQAPGKGLEWVSSISGSGSDTLYADSVKGRFTISRDNAKTTLYLQMNSLRPEDTAVYYCTIGGSLSRSSQGTLVTVSS

SEQ ID NO: 173 - protein, 406 aa, Artificial Sequence
  Nanobody sequence
EVQLVESGGGLVQPGGSLRLSCAASGTLFKINAMGWYRQAPGKRRELVALITSSDTTDYAESVEGRFTISRDNTWNAVYLQMNSLKPEDTAVYYCHSDHYSMGVPEKRVIMYGQGTLVTVSSGGGGSGGGGSGGGGSGGGGSGGGGSGGGGSGGGGSEVQLVESGGGLVQAGGSLRLSCAASGRTYYLNAMGWFRQGPGKDREFVAAIDWSDGNKDYADSVKGRFTISRDNAKNTVYLQMNSLKPEDTAVYYCAADTPPWGPMIYIESYDSWGQGTLVTVSSGGGGSGGGSEVQLVESGGGLVQPGNSLRLSCAASGFTFSSFGMSWVRQAPGKGLEWVSSISGSGSDTLYADSVKGRFTISRDNAKTTLYLQMNSLRPEDTAVYYCTIGGSLSRSSQGTLVTVSS

SEQ ID NO: 174 - protein, 394 aa, Artificial Sequence
  Nanobody sequence
EVQLVESGGGLVQPGGSLRLSCAASGTLFKINAMGWYRQAPGKRRELVALITSSDTTDYAESVEGRFTISRDNTWNAVYLQMNSLKPEDTAVYYCHSDHYSMGVPEKRVIMYGQGTLVTVSSGGGGSGGGGSGGGGSGGGGSGGGGSGGGGSGGGGSEVQLVESGGGLVQAGGSLRLSCAASGFTFSSYPMSWVRQAPGKGPAWVSTVSPGGITTSYADSVKGRFTISRDNAKNTLYLQMNSLKPEDTAVYYCLRDLNNRGQGTLVTVSSGGGGSGGGSEVQLVESGGGLVQPGNSLRLSCAASGFTFSSFGMSWVRQAPGKGLEWVSSISGSGSDTLYADSVKGRFTISRDNAKTTLYLQMNSLRPEDTAVYYCTIGGSLSRSSQGTLVTVSS

SEQ ID NO: 175 - protein, 387 aa, Artificial Sequence
  Nanobody sequence
EVQLVESGGGLVQPGGSLRLSCVASGFTFSSYWMYWVRQAPGKGVEWVSAISPGGVERYTDSVKGRFTISRDNAKNTLYLQMNSLKSEDTAMYYCARLTSFATPESQGTLVTVSSGGGGSGGGGSGGGGSGGGGSGGGGSGGGGSGGGGSEVQLVESGGGLVQAGGSLRLSCAASGFTFSSYPMSWVRQAPGKGPAWVSTVSPGGITTSYADSVKGRFTISRDNAKNTLYLQMNSLKPEDTAVYYCLRDLNNRGQGTQVTVSSGGGGSGGGSEVQLVESGGGLVQPGNSLRLSCAASGFTFSSFGMSWVRQAPGKGLEWVSSISGSGSDTLYADSVKGRFTISRDNAKTTLYLQMNSLRPEDTAVYYCTIGGSLSRSSQGTLVTVSS

SEQ ID NO: 176 - protein, 392 aa, Artificial Sequence
  Nanobody sequence
EVQLVESGGGLVQPGGSLRLSCVASGFTFSSYWMYWVRQAPGKGVEWVSAISPGGVERYTDSVKGRFTISRDNAKNTLYLQMNSLKSEDTAMYYCARLTSFATPESQGTLVTVSSGGGGSGGGGSGGGGSGGGGSGGGGSGGGGSGGGGSEVQLVESGGGLVQPGGSLRLSCAASGSIGGLNAMAWYRQAPGKERELVAGIFGVGSTRYADSVKGRFTISRDIAKNTVFLQMNSLNSEDTAVYYCRMSSVTRGSSDYWGQGTQVTVSSGGGGSGGGSEVQLVESGGGLVQPGNSLRLSCAASGFTFSSFGMSWVRQAPGKGLEWVSSISGSGSDTLYADSVKGRFTISRDNAKTTLYLQMNSLRPEDTAVYYCTIGGSLSRSSQGTLVTVSS

SEQ ID NO: 177 - protein, 395 aa, Artificial Sequence
  Nanobody sequence
EVQLVESGGGLVQPGGSLRLSCVASGFTFSSYWMYWVRQAPGKGVEWVSAISPGGVERYTDSVKGRFTISRDNAKNTLYLQMNSLKSEDTAMYYCARLTSFATPESQGTLVTVSSGGGGSGGGGSGGGGSGGGGSGGGGSGGGGSGGGGSEVQLVESGGGLVQPGGSLRLSCSASGSIFGLNAMGWYRQTPGKERELVAGITSITRVGSTRYADSAKGRFTISGDYAKNTVYLQMNSLKPEDTGVYYCRMSIVKSGGADYWGQGTQVTVSSGGGGSGGGSEVQLVESGGGLVQPGNSLRLSCAASGFTFSSFGMSWVRQAPGKGLEWVSSISGSGSDTLYADSVKGRFTISRDNAKTTLYLQMNSLRPEDTAVYYCTIGGSLSRSSQGTLVTVSS

SEQ ID NO: 178 - protein, 406 aa, Artificial Sequence
  Nanobody sequence
EVQLVESGGGLMQAGDSLRLSCAASGRAFSSYALGWFRRAPGKERECVAATDRLGDNTYFPDSVKGRFTISRDNAKNTLYLQMNNLKPEDTAVYYCAAGAVRYGVSTSPMNYNYWGQGTQVTVSSGGGGSGGGGSGGGGSGGGGSGGGGSGGGGSGGGGSEVQLVESGGGLVQPGGSLRLSCAASGTLFKINAMGWYRQAPGKRRELVALITSSDTTDYAESVEGRFTISRDNTWNAVYLQMNSLKPEDTAVYYCHSDHYSMGVPEKRVIMYGQGTQVTVSSGGGGSGGGSEVQLVESGGGLVQPGNSLRLSCAASGFTFSSFGMSWVRQAPGKGLEWVSSISGSGSDTLYADSVKGRFTISRDNAKTTLYLQMNSLRPEDTAVYYCTIGGSLSRSSQGTLVTVSS

SEQ ID NO: 179 - protein, 404 aa, Artificial Sequence
  Nanobody sequence
EVQLVESGGGLMQAGDSLRLSCAASGRAFSSYALGWFRRAPGKERECVAATDRLGDNTYFPDSVKGRFTISRDNAKNTLYLQMNNLKPEDTAVYYCAAGAVRYGVSTSPMNYNYWGQGTQVTVSSGGGGSGGGGSGGGGSGGGGSGGGGSGGGGSGGGGSEVQLVESGGGLVQPGGSLGLSCVASGSIFRINAMAWYRQAPGKQRELVAEITAGGSTNYADSVKGRFTISVDNAWNTLYLQMNSLKVEDTAVYYCNLDHYTTWDRRSAYWGQGTQVTVSSGGGGSGGGSEVQLVESGGGLVQPGNSLRLSCAASGFTFSSFGMSWVRQAPGKGLEWVSSISGSGSDTLYADSVKGRFTISRDNAKTTLYLQMNSLRPEDTAVYYCTIGGSLSRSSQGTLVTVSS

SEQ ID NO: 180 - protein, 402 aa, Artificial Sequence
  Nanobody sequence
EVQLVESGGGLMQAGDSLRLSCAASGRAFSSYALGWFRRAPGKERECVAATDRLGDNTYFPDSVKGRFTISRDNAKNTLYLQMNNLKPEDTAVYYCAAGAVRYGVSTSPMNYNYWGQGTQVTVSSGGGGSGGGGSGGGGSGGGGSGGGGSGGGGSGGGGSEVQLVESGGGLVQPGGSLRLSCAASGSIGGLNAMAWYRQAPGKERELVAGIFGVGSTRYADSVKGRFTISRDIAKNTVFLQMNSLNSEDTAVYYCRMSSVTRGSSDYWGQGTQVTVSSGGGGSGGGSEVQLVESGGGLVQPGNSLRLSCAASGFTFSSFGMSWVRQAPGKGLEWVSSISGSGSDTLYADSVKGRFTISRDNAKTTLYLQMNSLRPEDTAVYYCTIGGSLSRSSQGTLVTVSS

SEQ ID NO: 181 - protein, 405 aa, Artificial Sequence
  Nanobody sequence
EVQLVESGGGLMQAGDSLRLSCAASGRAFSSYALGWFRRAPGKERECVAATDRLGDNTYFPDSVKGRFTISRDNAKNTLYLQMNNLKPEDTAVYYCAAGAVRYGVSTSPMNYNYWGQGTQVTVSSGGGGSGGGGSGGGGSGGGGSGGGGSGGGGSGGGGSEVQLVESGGGLVQPGGSLRLSCSASGSIFGLNAMGWYRQTPGKERELVAGITSITRVGSTRYADSAKGRFTISGDYAKNTVYLQMNSLKPEDTGVYYCRMSIVKSGGADYWGQGTQVTVSSGGGGSGGGSEVQLVESGGGLVQPGNSLRLSCAASGFTFSSFGMSWVRQAPGKGLEWVSSISGSGSDTLYADSVKGRFTISRDNAKTTLYLQMNSLRPEDTAVYYCTIGGSLSRSSQGTLVTVSS

SEQ ID NO: 182 - protein, 387 aa, Artificial Sequence
  Nanobody sequence
EVQLVESGGGLVQAGGSLRLSCAASGFTFSSYPMSWVRQAPGKGPAWVSTVSPGGITTSYADSVKGRFTISRDNAKNTLYLQMNSLKPEDTAVYYCLRDLNNRGQGTQVTVSSGGGGSGGGGSGGGGSGGGGSGGGGSGGGGSGGGGSEVQLVESGGGLVQPGGSLRLSCVASGFTFSSYWMYWVRQAPGKGVEWVSAISPGGVERYTDSVKGRFTISRDNAKNTLYLQMNSLKSEDTAMYYCARLTSFATPESQGTQVTVSSGGGGSGGGSEVQLVESGGGLVQPGNSLRLSCAASGFTFSSFGMSWVRQAPGKGLEWVSSISGSGSDTLYADSVKGRFTISRDNAKTTLYLQMNSLRPEDTAVYYCTIGGSLSRSSQGTLVTVSS

SEQ ID NO: 183 - protein, 390 aa, Artificial Sequence
  Nanobody sequence
EVQLVESGGGLVQAGGSLRLSCAASGFTFSSYPMSWVRQAPGKGPAWVSTVSPGGITTSYADSVKGRFTISRDNAKNTLYLQMNSLKPEDTAVYYCLRDLNNRGQGTQVTVSSGGGGSGGGGSGGGGSGGGGSGGGGSGGGGSGGGGSEVQLVESGGGLVQPGGSLRLSCAASGSIGGLNAMAWYRQAPGKERELVAGIFGVGSTRYADSVKGRFTISRDIAKNTVFLQMNSLNSEDTAVYYCRMSSVTRGSSDYWGQGTQVTVSSGGGGSGGGSEVQLVESGGGLVQPGNSLRLSCAASGFTFSSFGMSWVRQAPGKGLEWVSSISGSGSDTLYADSVKGRFTISRDNAKTTLYLQMNSLRPEDTAVYYCTIGGSLSRSSQGTLVTVSS

SEQ ID NO: 184 - protein, 393 aa, Artificial Sequence
  Nanobody sequence
EVQLVESGGGLVQAGGSLRLSCAASGFTFSSYPMSWVRQAPGKGPAWVSTVSPGGITTSYADSVKGRFTISRDNAKNTLYLQMNSLKPEDTAVYYCLRDLNNRGQGTQVTVSSGGGGSGGGGSGGGGSGGGGSGGGGSGGGGSGGGGSEVQLVESGGGLVQPGGSLRLSCSASGSIFGLNAMGWYRQTPGKERELVAGITSITRVGSTRYADSAKGRFTISGDYAKNTVYLQMNSLKPEDTGVYYCRMSIVKSGGADYWGQGTQVTVSSGGGGSGGGSEVQLVESGGGLVQPGNSLRLSCAASGFTFSSFGMSWVRQAPGKGLEWVSSISGSGSDTLYADSVKGRFTISRDNAKTTLYLQMNSLRPEDTAVYYCTIGGSLSRSSQGTLVTVSS

SEQ ID NO: 185 - protein, 406 aa, Artificial Sequence
  Nanobody sequence
EVQLVESGGGLVQPGGSLRLSCAASGTLFKINAMGWYRQAPGKRRELVALITSSDTTDYAESVEGRFTISRDNTWNAVYLQMNSLKPEDTAVYYCHSDHYSMGVPEKRVIMYGQGTQVTVSSGGGGSGGGGSGGGGSGGGGSGGGGSGGGGSGGGGSEVQLVESGGGLMQAGDSLRLSCAASGRAFSSYALGWFRRAPGKERECVAATDRLGDNTYFPDSVKGRFTISRDNAKNTLYLQMNNLKPEDTAVYYCAAGAVRYGVSTSPMNYNYWGQGTQVTVSSGGGGSGGGSEVQLVESGGGLVQPGNSLRLSCAASGFTFSSFGMSWVRQAPGKGLEWVSSISGSGSDTLYADSVKGRFTISRDNAKTTLYLQMNSLRPEDTAVYYCTIGGSLSRSSQGTLVTVSS

SEQ ID NO: 186 - protein, 401 aa, Artificial Sequence
  Nanobody sequence
EVQLVESGGGLVQPGGSLRLSCAASGTLFKINAMGWYRQAPGKRRELVALITSSDTTDYAESVEGRFTISRDNTWNAVYLQMNSLKPEDTAVYYCHSDHYSMGVPEKRVIMYGQGTQVTVSSGGGGSGGGGSGGGGSGGGGSGGGGSGGGGSGGGGSEVQLVESGGGLVQPGGSLGLSCVASGSIFRINAMAWYRQAPGKQRELVAEITAGGSTNYADSVKGRFTISVDNAWNTLYLQMNSLKVEDTAVYYCNLDHYTTWDRRSAYWGQGTQVTVSSGGGGSGGGSEVQLVESGGGLVQPGNSLRLSCAASGFTFSSFGMSWVRQAPGKGLEWVSSISGSGSDTLYADSVKGRFTISRDNAKTTLYLQMNSLRPEDTAVYYCTIGGSLSRSSQGTLVTVSS

SEQ ID NO: 187 - protein, 399 aa, Artificial Sequence
  Nanobody sequence
EVQLVESGGGLVQPGGSLRLSCAASGTLFKINAMGWYRQAPGKRRELVALITSSDTTDYAESVEGRFTISRDNTWNAVYLQMNSLKPEDTAVYYCHSDHYSMGVPEKRVIMYGQGTQVTVSSGGGGSGGGGSGGGGSGGGGSGGGGSGGGGSGGGGSEVQLVESGGGLVQPGGSLRLSCAASGSIGGLNAMAWYRQAPGKERELVAGIFGVGSTRYADSVKGRFTISRDIAKNTVFLQMNSLNSEDTAVYYCRMSSVTRGSSDYWGQGTQVTVSSGGGGSGGGSEVQLVESGGGLVQPGNSLRLSCAASGFTFSSFGMSWVRQAPGKGLEWVSSISGSGSDTLYADSVKGRFTISRDNAKTTLYLQMNSLRPEDTAVYYCTIGGSLSRSSQGTLVTVSS

SEQ ID NO: 188 - protein, 402 aa, Artificial Sequence
  Nanobody sequence
EVQLVESGGGLVQPGGSLRLSCAASGTLFKINAMGWYRQAPGKRRELVALITSSDTTDYAESVEGRFTISRDNTWNAVYLQMNSLKPEDTAVYYCHSDHYSMGVPEKRVIMYGQGTQVTVSSGGGGSGGGGSGGGGSGGGGSGGGGSGGGGSGGGGSEVQLVESGGGLVQPGGSLRLSCSASGSIFGLNAMGWYRQTPGKERELVAGITSITRVGSTRYADSAKGRFTISGDYAKNTVYLQMNSLKPEDTGVYYCRMSIVKSGGADYWGQGTQVTVSSGGGGSGGGSEVQLVESGGGLVQPGNSLRLSCAASGFTFSSFGMSWVRQAPGKGLEWVSSISGSGSDTLYADSVKGRFTISRDNAKTTLYLQMNSLRPEDTAVYYCTIGGSLSRSSQGTLVTVSS

SEQ ID NO: 189 - protein, 402 aa, Artificial Sequence
  Nanobody sequence
EVQLVESGGGLVQAGGSLRLSCAASGRTYYLNAMGWFRQGPGKDREFVAAIDWSDGNKDYADSVKGRFTISRDNAKNTVYLQMNSLKPEDTAVYYCAADTPPWGPMIYIESYDSWGQGTQVTVSSGGGGSGGGGSGGGGSGGGGSGGGGSGGGGSGGGGSEVQLVESGGGLVQPGGSLRLSCAASGSIGGLNAMAWYRQAPGKERELVAGIFGVGSTRYADSVKGRFTISRDIAKNTVFLQMNSLNSEDTAVYYCRMSSVTRGSSDYWGQGTQVTVSSGGGGSGGGSEVQLVESGGGLVQPGNSLRLSCAASGFTFSSFGMSWVRQAPGKGLEWVSSISGSGSDTLYADSVKGRFTISRDNAKTTLYLQMNSLRPEDTAVYYCTIGGSLSRSSQGTLVTVSS

SEQ ID NO: 190 - protein, 405 aa, Artificial Sequence
  Nanobody sequence
EVQLVESGGGLVQAGGSLRLSCAASGRTYYLNAMGWFRQGPGKDREFVAAIDWSDGNKDYADSVKGRFTISRDNAKNTVYLQMNSLKPEDTAVYYCAADTPPWGPMIYIESYDSWGQGTQVTVSSGGGGSGGGGSGGGGSGGGGSGGGGSGGGGSGGGGSEVQLVESGGGLVQPGGSLRLSCSASGSIFGLNAMGWYRQTPGKERELVAGITSITRVGSTRYADSAKGRFTISGDYAKNTVYLQMNSLKPEDTGVYYCRMSIVKSGGADYWGQGTQVTVSSGGGGSGGGSEVQLVESGGGLVQPGNSLRLSCAASGFTFSSFGMSWVRQAPGKGLEWVSSISGSGSDTLYADSVKGRFTISRDNAKTTLYLQMNSLRPEDTAVYYCTIGGSLSRSSQGTLVTVSS

SEQ ID NO: 191 - protein, 404 aa, Artificial Sequence
  Nanobody sequence
EVQLVESGGGLVQPGGSLGLSCVASGSIFRINAMAWYRQAPGKQRELVAEITAGGSTNYADSVKGRFTISVDNAWNTLYLQMNSLKVEDTAVYYCNLDHYTTWDRRSAYWGQGTQVTVSSGGGGSGGGGSGGGGSGGGGSGGGGSGGGGSGGGGSEVQLVESGGGLMQAGDSLRLSCAASGRAFSSYALGWFRRAPGKERECVAATDRLGDNTYFPDSVKGRFTISRDNAKNTLYLQMNNLKPEDTAVYYCAAGAVRYGVSTSPMNYNYWGQGTQVTVSSGGGGSGGGSEVQLVESGGGLVQPGNSLRLSCAASGFTFSSFGMSWVRQAPGKGLEWVSSISGSGSDTLYADSVKGRFTISRDNAKTTLYLQMNSLRPEDTAVYYCTIGGSLSRSSQGTLVTVSS

SEQ ID NO: 192 - protein, 401 aa, Artificial Sequence
  Nanobody sequence
EVQLVESGGGLVQPGGSLGLSCVASGSIFRINAMAWYRQAPGKQRELVAEITAGGSTNYADSVKGRFTISVDNAWNTLYLQMNSLKVEDTAVYYCNLDHYTTWDRRSAYWGQGTQVTVSSGGGGSGGGGSGGGGSGGGGSGGGGSGGGGSGGGGSEVQLVESGGGLVQPGGSLRLSCAASGTLFKINAMGWYRQAPGKRRELVALITSSDTTDYAESVEGRFTISRDNTWNAVYLQMNSLKPEDTAVYYCHSDHYSMGVPEKRVIMYGQGTQVTVSSGGGGSGGGSEVQLVESGGGLVQPGNSLRLSCAASGFTFSSFGMSWVRQAPGKGLEWVSSISGSGSDTLYADSVKGRFTISRDNAKTTLYLQMNSLRPEDTAVYYCTIGGSLSRSSQGTLVTVSS

SEQ ID NO: 193 - protein, 397 aa, Artificial Sequence
  Nanobody sequence
EVQLVESGGGLVQPGGSLGLSCVASGSIFRINAMAWYRQAPGKQRELVAEITAGGSTNYADSVKGRFTISVDNAWNTLYLQMNSLKVEDTAVYYCNLDHYTTWDRRSAYWGQGTQVTVSSGGGGSGGGGSGGGGSGGGGSGGGGSGGGGSGGGGSEVQLVESGGGLVQPGGSLRLSCAASGSIGGLNAMAWYRQAPGKERELVAGIFGVGSTRYADSVKGRFTISRDIAKNTVFLQMNSLNSEDTAVYYCRMSSVTRGSSDYWGQGTQVTVSSGGGGSGGGSEVQLVESGGGLVQPGNSLRLSCAASGFTFSSFGMSWVRQAPGKGLEWVSSISGSGSDTLYADSVKGRFTISRDNAKTTLYLQMNSLRPEDTAVYYCTIGGSLSRSSQGTLVTVSS

SEQ ID NO: 194 - protein, 400 aa, Artificial Sequence
  Nanobody sequence
EVQLVESGGGLVQPGGSLGLSCVASGSIFRINAMAWYRQAPGKQRELVAEITAGGSTNYADSVKGRFTISVDNAWNTLYLQMNSLKVEDTAVYYCNLDHYTTWDRRSAYWGQGTQVTVSSGGGGSGGGGSGGGGSGGGGSGGGGSGGGGSGGGGSEVQLVESGGGLVQPGGSLRLSCSASGSIFGLNAMGWYRQTPGKERELVAGITSITRVGSTRYADSAKGRFTISGDYAKNTVYLQMNSLKPEDTGVYYCRMSIVKSGGADYWGQGTQVTVSSGGGGSGGGSEVQLVESGGGLVQPGNSLRLSCAASGFTFSSFGMSWVRQAPGKGLEWVSSISGSGSDTLYADSVKGRFTISRDNAKTTLYLQMNSLRPEDTAVYYCTIGGSLSRSSQGTLVTVSS

SEQ ID NO: 195 - protein, 390 aa, Artificial Sequence
  Nanobody sequence
EVQLVESGGGLVQPGGSLRLSCAASGSIGGLNAMAWYRQAPGKERELVAGIFGVGSTRYADSVKGRFTISRDIAKNTVFLQMNSLNSEDTAVYYCRMSSVTRGSSDYWGQGTQVTVSSGGGGSGGGGSGGGGSGGGGSGGGGSGGGGSGGGGSEVQLVESGGGLVQAGGSLRLSCAASGFTFSSYPMSWVRQAPGKGPAWVSTVSPGGITTSYADSVKGRFTISRDNAKNTLYLQMNSLKPEDTAVYYCLRDLNNRGQGTQVTVSSGGGGSGGGSEVQLVESGGGLVQPGNSLRLSCAASGFTFSSFGMSWVRQAPGKGLEWVSSISGSGSDTLYADSVKGRFTISRDNAKTTLYLQMNSLRPEDTAVYYCTIGGSLSRSSQGTLVTVSS

SEQ ID NO: 196 - protein, 402 aa, Artificial Sequence
  Nanobody sequence
EVQLVESGGGLVQPGGSLRLSCAASGSIGGLNAMAWYRQAPGKERELVAGIFGVGSTRYADSVKGRFTISRDIAKNTVFLQMNSLNSEDTAVYYCRMSSVTRGSSDYWGQGTQVTVSSGGGGSGGGGSGGGGSGGGGSGGGGSGGGGSGGGGSEVQLVESGGGLMQAGDSLRLSCAASGRAFSSYALGWFRRAPGKERECVAATDRLGDNTYFPDSVKGRFTISRDNAKNTLYLQMNNLKPEDTAVYYCAAGAVRYGVSTSPMNYNYWGQGTQVTVSSGGGGSGGGSEVQLVESGGGLVQPGNSLRLSCAASGFTFSSFGMSWVRQAPGKGLEWVSSISGSGSDTLYADSVKGRFTISRDNAKTTLYLQMNSLRPEDTAVYYCTIGGSLSRSSQGTLVTVSS

SEQ ID NO: 197 - protein, 392 aa, Artificial Sequence
  Nanobody sequence
EVQLVESGGGLVQPGGSLRLSCAASGSIGGLNAMAWYRQAPGKERELVAGIFGVGSTRYADSVKGRFTISRDIAKNTVFLQMNSLNSEDTAVYYCRMSSVTRGSSDYWGQGTQVTVSSGGGGSGGGGSGGGGSGGGGSGGGGSGGGGSGGGGSEVQLVESGGGLVQPGGSLRLSCVASGFTFSSYWMYWVRQAPGKGVEWVSAISPGGVERYTDSVKGRFTISRDNAKNTLYLQMNSLKSEDTAMYYCARLTSFATPESQGTQVTVSSGGGGSGGGSEVQLVESGGGLVQPGNSLRLSCAASGFTFSSFGMSWVRQAPGKGLEWVSSISGSGSDTLYADSVKGRFTISRDNAKTTLYLQMNSLRPEDTAVYYCTIGGSLSRSSQGTLVTVSS

SEQ ID NO: 198 - protein, 399 aa, Artificial Sequence
  Nanobody sequence
EVQLVESGGGLVQPGGSLRLSCAASGSIGGLNAMAWYRQAPGKERELVAGIFGVGSTRYADSVKGRFTISRDIAKNTVFLQMNSLNSEDTAVYYCRMSSVTRGSSDYWGQGTQVTVSSGGGGSGGGGSGGGGSGGGGSGGGGSGGGGSGGGGSEVQLVESGGGLVQPGGSLRLSCAASGTLFKINAMGWYRQAPGKRRELVALITSSDTTDYAESVEGRFTISRDNTWNAVYLQMNSLKPEDTAVYYCHSDHYSMGVPEKRVIMYGQGTQVTVSSGGGGSGGGSEVQLVESGGGLVQPGNSLRLSCAASGFTFSSFGMSWVRQAPGKGLEWVSSISGSGSDTLYADSVKGRFTISRDNAKTTLYLQMNSLRPEDTAVYYCTIGGSLSRSSQGTLVTVSS

SEQ ID NO: 199 - protein, 402 aa, Artificial Sequence
  Nanobody sequence
EVQLVESGGGLVQPGGSLRLSCAASGSIGGLNAMAWYRQAPGKERELVAGIFGVGSTRYADSVKGRFTISRDIAKNTVFLQMNSLNSEDTAVYYCRMSSVTRGSSDYWGQGTQVTVSSGGGGSGGGGSGGGGSGGGGSGGGGSGGGGSGGGGSEVQLVESGGGLVQAGGSLRLSCAASGRTYYLNAMGWFRQGPGKDREFVAAIDWSDGNKDYADSVKGRFTISRDNAKNTVYLQMNSLKPEDTAVYYCAADTPPWGPMIYIESYDSWGQGTQVTVSSGGGGSGGGSEVQLVESGGGLVQPGNSLRLSCAASGFTFSSFGMSWVRQAPGKGLEWVSSISGSGSDTLYADSVKGRFTISRDNAKTTLYLQMNSLRPEDTAVYYCTIGGSLSRSSQGTLVTVSS

SEQ ID NO: 200 - protein, 397 aa, Artificial Sequence
  Nanobody sequence
EVQLVESGGGLVQPGGSLRLSCAASGSIGGLNAMAWYRQAPGKERELVAGIFGVGSTRYADSVKGRFTISRDIAKNTVFLQMNSLNSEDTAVYYCRMSSVTRGSSDYWGQGTQVTVSSGGGGSGGGGSGGGGSGGGGSGGGGSGGGGSGGGGSEVQLVESGGGLVQPGGSLGLSCVASGSIFRINAMAWYRQAPGKQRELVAEITAGGSTNYADSVKGRFTISVDNAWNTLYLQMNSLKVEDTAVYYCNLDHYTTWDRRSAYWGQGTQVTVSSGGGGSGGGSEVQLVESGGGLVQPGNSLRLSCAASGFTFSSFGMSWVRQAPGKGLEWVSSISGSGSDTLYADSVKGRFTISRDNAKTTLYLQMNSLRPEDTAVYYCTIGGSLSRSSQGTLVTVSS

SEQ ID NO: 201 - protein, 395 aa, Artificial Sequence
  Nanobody sequence
EVQLVESGGGLVQPGGSLRLSCAASGSIGGLNAMAWYRQAPGKERELVAGIFGVGSTRYADSVKGRFTISRDIAKNTVFLQMNSLNSEDTAVYYCRMSSVTRGSSDYWGQGTQVTVSSGGGGSGGGGSGGGGSGGGGSGGGGSGGGGSGGGGSEVQLVESGGGLVQPGGSLRLSCAASGSIGGLNAMAWYRQAPGKERELVAGIFGVGSTRYADSVKGRFTISRDIAKNTVFLQMNSLNSEDTAVYYCRMSSVTRGSSDYWGQGTQVTVSSGGGGSGGGSEVQLVESGGGLVQPGNSLRLSCAASGFTFSSFGMSWVRQAPGKGLEWVSSISGSGSDTLYADSVKGRFTISRDNAKTTLYLQMNSLRPEDTAVYYCTIGGSLSRSSQGTLVTVSS

SEQ ID NO: 202 - protein, 398 aa, Artificial Sequence
  Nanobody sequence
EVQLVESGGGLVQPGGSLRLSCAASGSIGGLNAMAWYRQAPGKERELVAGIFGVGSTRYADSVKGRFTISRDIAKNTVFLQMNSLNSEDTAVYYCRMSSVTRGSSDYWGQGTQVTVSSGGGGSGGGGSGGGGSGGGGSGGGGSGGGGSGGGGSEVQLVESGGGLVQPGGSLRLSCSASGSIFGLNAMGWYRQTPGKERELVAGITSITRVGSTRYADSAKGRFTISGDYAKNTVYLQMNSLKPEDTGVYYCRMSIVKSGGADYWGQGTQVTVSSGGGGSGGGSEVQLVESGGGLVQPGNSLRLSCAASGFTFSSFGMSWVRQAPGKGLEWVSSISGSGSDTLYADSVKGRFTISRDNAKTTLYLQMNSLRPEDTAVYYCTIGGSLSRSSQGTLVTVSS

SEQ ID NO: 203 - protein, 393 aa, Artificial Sequence
  Nanobody sequence
EVQLVESGGGLVQPGGSLRLSCSASGSIFGLNAMGWYRQTPGKERELVAGITSITRVGSTRYADSAKGRFTISGDYAKNTVYLQMNSLKPEDTGVYYCRMSIVKSGGADYWGQGTQVTVSSGGGGSGGGGSGGGGSGGGGSGGGGSGGGGSGGGGSEVQLVESGGGLVQAGGSLRLSCAASGFTFSSYPMSWVRQAPGKGPAWVSTVSPGGITTSYADSVKGRFTISRDNAKNTLYLQMNSLKPEDTAVYYCLRDLNNRGQGTQVTVSSGGGGSGGGSEVQLVESGGGLVQPGNSLRLSCAASGFTFSSFGMSWVRQAPGKGLEWVSSISGSGSDTLYADSVKGRFTISRDNAKTTLYLQMNSLRPEDTAVYYCTIGGSLSRSSQGTLVTVSS

SEQ ID NO: 204 - protein, 405 aa, Artificial Sequence
  Nanobody sequence
EVQLVESGGGLVQPGGSLRLSCSASGSIFGLNAMGWYRQTPGKERELVAGITSITRVGSTRYADSAKGRFTISGDYAKNTVYLQMNSLKPEDTGVYYCRMSIVKSGGADYWGQGTQVTVSSGGGGSGGGGSGGGGSGGGGSGGGGSGGGGSGGGGSEVQLVESGGGLMQAGDSLRLSCAASGRAFSSYALGWFRRAPGKERECVAATDRLGDNTYFPDSVKGRFTISRDNAKNTLYLQMNNLKPEDTAVYYCAAGAVRYGVSTSPMNYNYWGQGTQVTVSSGGGGSGGGSEVQLVESGGGLVQPGNSLRLSCAASGFTFSSFGMSWVRQAPGKGLEWVSSISGSGSDTLYADSVKGRFTISRDNAKTTLYLQMNSLRPEDTAVYYCTIGGSLSRSSQGTLVTVSS

SEQ ID NO: 205 - protein, 395 aa, Artificial Sequence
  Nanobody sequence
EVQLVESGGGLVQPGGSLRLSCSASGSIFGLNAMGWYRQTPGKERELVAGITSITRVGSTRYADSAKGRFTISGDYAKNTVYLQMNSLKPEDTGVYYCRMSIVKSGGADYWGQGTQVTVSSGGGGSGGGGSGGGGSGGGGSGGGGSGGGGSGGGGSEVQLVESGGGLVQPGGSLRLSCVASGFTFSSYWMYWVRQAPGKGVEWVSAISPGGVERYTDSVKGRFTISRDNAKNTLYLQMNSLKSEDTAMYYCARLTSFATPESQGTQVTVSSGGGGSGGGSEVQLVESGGGLVQPGNSLRLSCAASGFTFSSFGMSWVRQAPGKGLEWVSSISGSGSDTLYADSVKGRFTISRDNAKTTLYLQMNSLRPEDTAVYYCTIGGSLSRSSQGTLVTVSS

SEQ ID NO: 206 - protein, 402 aa, Artificial Sequence
  Nanobody sequence
EVQLVESGGGLVQPGGSLRLSCSASGSIFGLNAMGWYRQTPGKERELVAGITSITRVGSTRYADSAKGRFTISGDYAKNTVYLQMNSLKPEDTGVYYCRMSIVKSGGADYWGQGTQVTVSSGGGGSGGGGSGGGGSGGGGSGGGGSGGGGSGGGGSEVQLVESGGGLVQPGGSLRLSCAASGTLFKINAMGWYRQAPGKRRELVALITSSDTTDYAESVEGRFTISRDNTWNAVYLQMNSLKPEDTAVYYCHSDHYSMGVPEKRVIMYGQGTQVTVSSGGGGSGGGSEVQLVESGGGLVQPGNSLRLSCAASGFTFSSFGMSWVRQAPGKGLEWVSSISGSGSDTLYADSVKGRFTISRDNAKTTLYLQMNSLRPEDTAVYYCTIGGSLSRSSQGTLVTVSS

SEQ ID NO: 207 - protein, 405 aa, Artificial Sequence
  Nanobody sequence
EVQLVESGGGLVQPGGSLRLSCSASGSIFGLNAMGWYRQTPGKERELVAGITSITRVGSTRYADSAKGRFTISGDYAKNTVYLQMNSLKPEDTGVYYCRMSIVKSGGADYWGQGTQVTVSSGGGGSGGGGSGGGGSGGGGSGGGGSGGGGSGGGGSEVQLVESGGGLVQAGGSLRLSCAASGRTYYLNAMGWFRQGPGKDREFVAAIDWSDGNKDYADSVKGRFTISRDNAKNTVYLQMNSLKPEDTAVYYCAADTPPWGPMIYIESYDSWGQGTQVTVSSGGGGSGGGSEVQLVESGGGLVQPGNSLRLSCAASGFTFSSFGMSWVRQAPGKGLEWVSSISGSGSDTLYADSVKGRFTISRDNAKTTLYLQMNSLRPEDTAVYYCTIGGSLSRSSQGTLVTVSS

SEQ ID NO: 208 - protein, 400 aa, Artificial Sequence
  Nanobody sequence
EVQLVESGGGLVQPGGSLRLSCSASGSIFGLNAMGWYRQTPGKERELVAGITSITRVGSTRYADSAKGRFTISGDYAKNTVYLQMNSLKPEDTGVYYCRMSIVKSGGADYWGQGTQVTVSSGGGGSGGGGSGGGGSGGGGSGGGGSGGGGSGGGGSEVQLVESGGGLVQPGGSLGLSCVASGSIFRINAMAWYRQAPGKQRELVAEITAGGSTNYADSVKGRFTISVDNAWNTLYLQMNSLKVEDTAVYYCNLDHYTTWDRRSAYWGQGTQVTVSSGGGGSGGGSEVQLVESGGGLVQPGNSLRLSCAASGFTFSSFGMSWVRQAPGKGLEWVSSISGSGSDTLYADSVKGRFTISRDNAKTTLYLQMNSLRPEDTAVYYCTIGGSLSRSSQGTLVTVSS

SEQ ID NO: 209 - protein, 398 aa, Artificial Sequence
  Nanobody sequence
EVQLVESGGGLVQPGGSLRLSCSASGSIFGLNAMGWYRQTPGKERELVAGITSITRVGSTRYADSAKGRFTISGDYAKNTVYLQMNSLKPEDTGVYYCRMSIVKSGGADYWGQGTQVTVSSGGGGSGGGGSGGGGSGGGGSGGGGSGGGGSGGGGSEVQLVESGGGLVQPGGSLRLSCAASGSIGGLNAMAWYRQAPGKERELVAGIFGVGSTRYADSVKGRFTISRDIAKNTVFLQMNSLNSEDTAVYYCRMSSVTRGSSDYWGQGTQVTVSSGGGGSGGGSEVQLVESGGGLVQPGNSLRLSCAASGFTFSSFGMSWVRQAPGKGLEWVSSISGSGSDTLYADSVKGRFTISRDNAKTTLYLQMNSLRPEDTAVYYCTIGGSLSRSSQGTLVTVSS

SEQ ID NO: 210 - protein, 401 aa, Artificial Sequence
  Nanobody sequence
EVQLVESGGGLVQPGGSLRLSCSASGSIFGLNAMGWYRQTPGKERELVAGITSITRVGSTRYADSAKGRFTISGDYAKNTVYLQMNSLKPEDTGVYYCRMSIVKSGGADYWGQGTQVTVSSGGGGSGGGGSGGGGSGGGGSGGGGSGGGGSGGGGSEVQLVESGGGLVQPGGSLRLSCSASGSIFGLNAMGWYRQTPGKERELVAGITSITRVGSTRYADSAKGRFTISGDYAKNTVYLQMNSLKPEDTGVYYCRMSIVKSGGADYWGQGTQVTVSSGGGGSGGGSEVQLVESGGGLVQPGNSLRLSCAASGFTFSSFGMSWVRQAPGKGLEWVSSISGSGSDTLYADSVKGRFTISRDNAKTTLYLQMNSLRPEDTAVYYCTIGGSLSRSSQGTLVTVSS

SEQ ID NO: 211 - protein, 409 aa, Artificial Sequence; identical to SEQ ID NO: 157
  Nanobody sequence

SEQ ID NO: 212 - protein, 404 aa, Artificial Sequence; identical to SEQ ID NO: 158
  Nanobody sequence

SEQ ID NO: 213 - protein, 397 aa, Artificial Sequence; identical to SEQ ID NO: 159
  Nanobody sequence

SEQ ID NO: 214 - protein, 404 aa, Artificial Sequence; identical to SEQ ID NO: 161
  Nanobody sequence

SEQ ID NO: 215 - protein, 392 aa, Artificial Sequence; identical to SEQ ID NO: 163
  Nanobody sequence

SEQ ID NO: 216 - protein, 397 aa, Artificial Sequence; identical to SEQ ID NO: 165
  Nanobody sequence

SEQ ID NO: 217 - protein, 392 aa, Artificial Sequence; identical to SEQ ID NO: 166
  Nanobody sequence

SEQ ID NO: 218 - protein, 385 aa, Artificial Sequence; identical to SEQ ID NO: 167
  Nanobody sequence

SEQ ID NO: 219 - protein, 406 aa, Artificial Sequence; identical to SEQ ID NO: 169
  Nanobody sequence

SEQ ID NO: 220 - protein, 394 aa, Artificial Sequence; identical to SEQ ID NO: 170
  Nanobody sequence

SEQ ID NO: 221 - protein, 403 aa, Artificial Sequence; identical to SEQ ID NO: 172
  Nanobody sequence

SEQ ID NO: 222 - protein, 406 aa, Artificial Sequence; identical to SEQ ID NO: 173
  Nanobody sequence

SEQ ID NO: 223 - protein, 394 aa, Artificial Sequence; identical to SEQ ID NO: 174
  Nanobody sequence

SEQ ID NO: 224 - protein, 136 aa, Artificial Sequence
  Nanobody sequence
EVQLVESGGGLVQPGGSLRLSCAASGFTFSSYPMSWVRQAPGKGPAWVSTVSPGGITTSYADSVKGRFTISRDNSKNTLYLQMNSLRPEDTAVYYCLRDLNNRGQGTLVTVSSAAAEQKLISEEDLNGAAHHHHHH

SEQ ID NO: 225 - protein, 136 aa, Artificial Sequence
  Nanobody sequence
EVQLVESGGGLVQPGGSLRLSCAASGFTFSSYPMSWVRQAPGKGPEWVSTVSPGGITTSYADSVKGRFTISRDNSKNTLYLQMNSLRPEDTAVYYCLRDLNNRGQGTLVTVSSAAAEQKLISEEDLNGAAHHHHHH

SEQ ID NO: 226 - protein, 136 aa, Artificial Sequence
  Nanobody sequence
EVQLVESGGGLVQPGGSLRLSCAASGFTFSSYPMSWVRQAPGKGPAWVSTVSPGGITTSYADSVKGRFTISRDNSKNTLYLQMNSLRPEDTAVYYCARDLNNRGQGTLVTVSSAAAEQKLISEEDLNGAAHHHHHH

SEQ ID NO: 227 - protein, 136 aa, Artificial Sequence
  Nanobody sequence
EVQLVESGGGLVQPGGSLRLSCAASGFTFSSYPMSWVRQAPGKGPEWVSTVSPGGITTSYADSVKGRFTISRDNSKNTLYLQMNSLRPEDTAVYYCARDLNNRGQGTLVTVSSAAAEQKLISEEDLNGAAHHHHHH

SEQ ID NO: 228 - protein, 148 aa, Artificial Sequence
  Nanobody sequence
EVQLVESGGGLVQPGGSLRLSCAASGRTYYLNAMGWFRQGPGKDREFVAAIDWSDGNKDYADSVKGRFTISRDNSKNTVYLQMNSLRPEDTAVYYCAADTPPWGPMIYIESYDSWGQGTLVTVSSAAAEQKLISEEDLNGAAHHHHHH

SEQ ID NO: 229 - protein, 148 aa, Artificial Sequence
  Nanobody sequence
EVQLVESGGGLVQPGGSLRLSCAASGRTYYLNAMGWFRQAPGKDREFVAAIDWSDGNKDYADSVKGRFTISRDNSKNTVYLQMNSLRPEDTAVYYCAADTPPWGPMIYIESYDSWGQGTLVTVSSAAAEQKLISEEDLNGAAHHHHHH

SEQ ID NO: 230 - protein, 148 aa, Artificial Sequence
  Nanobody sequence
EVQLVESGGGLVQPGGSLRLSCAASGRTYYLNAMGWFRQGPGKEREFVAAIDWSDGNKDYADSVKGRFTISRDNSKNTVYLQMNSLRPEDTAVYYCAADTPPWGPMIYIESYDSWGQGTLVTVSSAAAEQKLISEEDLNGAAHHHHHH

SEQ ID NO: 231 - protein, 148 aa, Artificial Sequence
  Nanobody sequence
EVQLVESGGGLVQPGGSLRLSCAASGRTYYLNAMGWFRQAPGKEREFVAAIDWSDGNKDYADSVKGRFTISRDNSKNTVYLQMNSLRPEDTAVYYCAADTPPWGPMIYIESYDSWGQGTLVTVSSAAAEQKLISEEDLNGAAHHHHHH

SEQ ID NO: 232 - protein, 397 aa, Artificial Sequence
  Nanobody sequence
EVQLVESGGGLVQPGGSLGLSCVASGSIFRINAMAWYRQAPGKQRELVAEITAGGSTNYADSVKGRFTISVDNAWNTLYLQMNSLKVEDTAVYYCNLDHYTTWDRRSAYWGQGTLVTVSSGGGGSGGGGSGGGGSGGGGSGGGGSGGGGSGGGGSEVQLVESGGGLVQPGGSLRLSCAASGSIGGLNAMAWYRQAPGKERELVAGIFGVGSTRYADSVKGRFTISRDIAKNTVFLQMNSLNSEDTAVYYCRMSSVTRGSSDYWGQGTLVTVSSGGGGSGGGSEVQLVESGGGLVQPGNSLRLSCAASGFTFSSFGMSWVRQAPGKGLEWVSSISGSGSDTLYADSVKGRFTISRDNAKTTLYLQMNSLRPEDTAVYYCTIGGSLSRSSQGTLVTVSS

SEQ ID NO: 233 - protein, 399 aa, Artificial Sequence
  Nanobody sequence
EVQLVESGGGLVQPGGSLRLSCAASGTLFKINAMGWYRQAPGKRRELVALITSSDTTDYAESVEGRFTISRDNTWNAVYLQMNSLKPEDTAVYYCHSDHYSMGVPEKRVIMYGQGTLVTVSSGGGGSGGGGSGGGGSGGGGSGGGGSGGGGSGGGGSEVQLVESGGGLVQPGGSLRLSCAASGSIGGLNAMAWYRQAPGKERELVAGIFGVGSTRYADSVKGRFTISRDIAKNTVFLQMNSLNSEDTAVYYCRMSSVTRGSSDYWGQGTLVTVSSGGGGSGGGSEVQLVESGGGLVQPGNSLRLSCAASGFTFSSFGMSWVRQAPGKGLEWVSSISGSGSDTLYADSVKGRFTISRDNAKTTLYLQMNSLRPEDTAVYYCTIGGSLSRSSQGTLVTVSS

SEQ ID NO: 234 - protein, 397 aa, Artificial Sequence
  Nanobody sequence
EVQLVESGGGLVQPGGSLRLSCAASGSIGGLNAMAWYRQAPGKERELVAGIFGVGSTRYADSVKGRFTISRDIAKNTVFLQMNSLNSEDTAVYYCRMSSVTRGSSDYWGQGTLVTVSSGGGGSGGGGSGGGGSGGGGSGGGGSGGGGSGGGGSEVQLVESGGGLVQPGGSLGLSCVASGSIFRINAMAWYRQAPGKQRELVAEITAGGSTNYADSVKGRFTISVDNAWNTLYLQMNSLKVEDTAVYYCNLDHYTTWDRRSAYWGQGTLVTVSSGGGGSGGGSEVQLVESGGGLVQPGNSLRLSCAASGFTFSSFGMSWVRQAPGKGLEWVSSISGSGSDTLYADSVKGRFTISRDNAKTTLYLQMNSLRPEDTAVYYCTIGGSLSRSSQGTLVTVSS

SEQ ID NO: 235 - protein, 390 aa, Artificial Sequence
  Nanobody sequence
EVQLVESGGGLVQAGGSLRLSCAASGFTFSSYPMSWVRQAPGKGPAWVSTVSPGGITTSYADSVKGRFTISRDNAKNTLYLQMNSLKPEDTAVYYCLRDLNNRGQGTLVTVSSGGGGSGGGGSGGGGSGGGGSGGGGSGGGGSGGGGSEVQLVESGGGLVQPGGSLRLSCAASGSIGGLNAMAWYRQAPGKERELVAGIFGVGSTRYADSVKGRFTISRDIAKNTVFLQMNSLNSEDTAVYYCRMSSVTRGSSDYWGQGTLVTVSSGGGGSGGGSEVQLVESGGGLVQPGNSLRLSCAASGFTFSSFGMSWVRQAPGKGLEWVSSISGSGSDTLYADSVKGRFTISRDNAKTTLYLQMNSLRPEDTAVYYCTIGGSLSRSSQGTLVTVSS

SEQ ID NO: 236 - protein, 395 aa, Artificial Sequence
  Nanobody sequence
EVQLVESGGGLVQPGGSLRLSCAASGSIGGLNAMAWYRQAPGKERELVAGIFGVGSTRYADSVKGRFTISRDIAKNTVFLQMNSLNSEDTAVYYCRMSSVTRGSSDYWGQGTLVTVSSGGGGSGGGGSGGGGSGGGGSGGGGSGGGGSGGGGSEVQLVESGGGLVQPGGSLRLSCAASGSIGGLNAMAWYRQAPGKERELVAGIFGVGSTRYADSVKGRFTISRDIAKNTVFLQMNSLNSEDTAVYYCRMSSVTRGSSDYWGQGTLVTVSSGGGGSGGGSEVQLVESGGGLVQPGNSLRLSCAASGFTFSSFGMSWVRQAPGKGLEWVSSISGSGSDTLYADSVKGRFTISRDNAKTTLYLQMNSLRPEDTAVYYCTIGGSLSRSSQGTLVTVSS

SEQ ID NO: 237 - protein, 390 aa, Artificial Sequence
  Nanobody sequence
EVQLVESGGGLVQPGGSLRLSCAASGSIGGLNAMAWYRQAPGKERELVAGIFGVGSTRYADSVKGRFTISRDIAKNTVFLQMNSLNSEDTAVYYCRMSSVTRGSSDYWGQGTLVTVSSGGGGSGGGGSGGGGSGGGGSGGGGSGGGGSGGGGSEVQLVESGGGLVQAGGSLRLSCAASGFTFSSYPMSWVRQAPGKGPAWVSTVSPGGITTSYADSVKGRFTISRDNAKNTLYLQMNSLKPEDTAVYYCLRDLNNRGQGTLVTVSSGGGGSGGGSEVQLVESGGGLVQPGNSLRLSCAASGFTFSSFGMSWVRQAPGKGLEWVSSISGSGSDTLYADSVKGRFTISRDNAKTTLYLQMNSLRPEDTAVYYCTIGGSLSRSSQGTLVTVSS

SEQ ID NO: 238 - protein, 399 aa, Artificial Sequence
  Nanobody sequence
EVQLVESGGGLVQPGGSLRLSCAASGSIGGLNAMAWYRQAPGKERELVAGIFGVGSTRYADSVKGRFTISRDIAKNTVFLQMNSLNSEDTAVYYCRMSSVTRGSSDYWGQGTLVTVSSGGGGSGGGGSGGGGSGGGGSGGGGSGGGGSGGGGSEVQLVESGGGLVQPGGSLRLSCAASGTLFKINAMGWYRQAPGKRRELVALITSSDTTDYAESVEGRFTISRDNTWNAVYLQMNSLKPEDTAVYYCHSDHYSMGVPEKRVIMYGQGTLVTVSSGGGGSGGGSEVQLVESGGGLVQPGNSLRLSCAASGFTFSSFGMSWVRQAPGKGLEWVSSISGSGSDTLYADSVKGRFTISRDNAKTTLYLQMNSLRPEDTAVYYCTIGGSLSRSSQGTLVTVSS

SEQ ID NO: 239 - protein, 402 aa, Artificial Sequence
  Nanobody sequence
EVQLVESGGGLVQAGGSLRLSCAASGRTYYLNAMGWFRQGPGKDREFVAAIDWSDGNKDYADSVKGRFTISRDNAKNTVYLQMNSLKPEDTAVYYCAADTPPWGPMIYIESYDSWGQGTLVTVSSGGGGSGGGGSGGGGSGGGGSGGGGSGGGGSGGGGSEVQLVESGGGLVQPGGSLRLSCAASGSIGGLNAMAWYRQAPGKERELVAGIFGVGSTRYADSVKGRFTISRDIAKNTVFLQMNSLNSEDTAVYYCRMSSVTRGSSDYWGQGTLVTVSSGGGGSGGGSEVQLVESGGGLVQPGNSLRLSCAASGFTFSSFGMSWVRQAPGKGLEWVSSISGSGSDTLYADSVKGRFTISRDNAKTTLYLQMNSLRPEDTAVYYCTIGGSLSRSSQGTLVTVSS

SEQ ID NO: 240 - protein, 402 aa, Artificial Sequence
  Nanobody sequence
EVQLVESGGGLVQPGGSLRLSCAASGSIGGLNAMAWYRQAPGKERELVAGIFGVGSTRYADSVKGRFTISRDIAKNTVFLQMNSLNSEDTAVYYCRMSSVTRGSSDYWGQGTLVTVSSGGGGSGGGGSGGGGSGGGGSGGGGSGGGGSGGGGSEVQLVESGGGLVQAGGSLRLSCAASGRTYYLNAMGWFRQGPGKDREFVAAIDWSDGNKDYADSVKGRFTISRDNAKNTVYLQMNSLKPEDTAVYYCAADTPPWGPMIYIESYDSWGQGTLVTVSSGGGGSGGGSEVQLVESGGGLVQPGNSLRLSCAASGFTFSSFGMSWVRQAPGKGLEWVSSISGSGSDTLYADSVKGRFTISRDNAKTTLYLQMNSLRPEDTAVYYCTIGGSLSRSSQGTLVTVSS

SEQ ID NO: 241 - protein, 145 aa, Artificial Sequence
  Nanobody sequence
EVQLVESGGGLVQPGGSLRLSCAASGTLFKINAMGWYRQAPGKRRELVALITSSDTTDYAESVEGRFTISRDNTWNAVYLQMNSLKPEDTAVYYCHSDHYSGGVPEKRVIMYGQGTLVTVSSAAAEQKLISEEDLNGAAHHHHHH

SEQ ID NO: 242 - protein, 145 aa, Artificial Sequence
  Nanobody sequence
EVQLVESGGGLVQPGGSLRLSCAASGTLFKINAMGWYRQAPGKRRELVALITSSDTTDYAESVEGRFTISRDNTWNAVYLQMNSLKPEDTAVYYCHSDHYSLGVPEKRVIMYGQGTLVTVSSAAAEQKLISEEDLNGAAHHHHHH

SEQ ID NO: 243 - protein, 145 aa, Artificial Sequence
  Nanobody sequence
EVQLVESGGGLVQPGGSLRLSCAASGTLFKINAMGWYRQAPGKRRELVALITSSDTTDYAESVEGRFTISRDNTWNAVYLQMNSLKPEDTAVYYCHSDHYSIGVPEKRVIMYGQGTLVTVSSAAAEQKLISEEDLNGAAHHHHHH

SEQ ID NO: 244 - protein, 145 aa, Artificial Sequence
  Nanobody sequence
EVQLVESGGGLVQPGGSLRLSCAASGTLFKINAMGWYRQAPGKRRELVALITSSDTTDYAESVEGRFTISRDNTWNAVYLQMNSLKPEDTAVYYCHSDHYSVGVPEKRVIMYGQGTLVTVSSAAAEQKLISEEDLNGAAHHHHHH

SEQ ID NO: 245 - protein, 145 aa, Artificial Sequence
  Nanobody sequence
EVQLVESGGGLVQPGGSLRLSCAASGTLFKINAMGWYRQAPGKRRELVALITSSDTTDYAESVEGRFTISRDNTWNAVYLQMNSLKPEDTAVYYCHSDHYSMGVPEKRVILYGQGTLVTVSSAAAEQKLISEEDLNGAAHHHHHH

SEQ ID NO: 246 - protein, 145 aa, Artificial Sequence
  Nanobody sequence
EVQLVESGGGLVQPGGSLRLSCAASGTLFKINAMGWYRQAPGKRRELVALITSSDTTDYAESVEGRFTISRDNTWNAVYLQMNSLKPEDTAVYYCHSDHYSMGVPEKRVIDYGQGTLVTVSSAAAEQKLISEEDLNGAAHHHHHH

SEQ ID NO: 247 - protein, 145 aa, Artificial Sequence
  Nanobody sequence
EVQLVESGGGLVQPGGSLRLSCAASGTLFKINAMGWYRQAPGKRRELVALITSSDTTDYAESVEGRFTISRDNTWNAVYLQMNSLKPEDTAVYYCHSDHYSMGVPEKRVIEYGQGTLVTVSSAAAEQKLISEEDLNGAAHHHHHH

SEQ ID NO: 248 - protein, 141 aa, Artificial Sequence
  Nanobody sequence
EVQLVESGGGLVQPGGSLRLSCAASGSIGGLNAMAWYRQAPGKERELVAGIFGVGSTRYADSVKGRFTISRDISKNTVFLQMNSLRSEDTAVYYCRMSSVTRGSSDYWGQGTLVTVSSAAAEQKLISEEDLNGAAHHHHHH

SEQ ID NO: 249 - protein, 141 aa, Artificial Sequence
  Nanobody sequence
EVQLVESGGGLVQPGGSLRLSCAASGSIGGLNAMAWYRQAPGKERELVAGIFGVGSTRYADSVKGRFTISRDNSKNTVFLQMNSLRSEDTAVYYCRMSSVTRGSSDYWGQGTLVTVSSAAAEQKLISEEDLNGAAHHHHHH

SEQ ID NO: 250 - protein, 141 aa, Artificial Sequence
  Nanobody sequence
EVQLVESGGGLVQPGGSLRLSCAASGSIGGLNAMAWYRQAPGKERELVAGIFGVGSTRYADSVKGRFTISRDISKNTVYLQMNSLRSEDTAVYYCRMSSVTRGSSDYWGQGTLVTVSSAAAEQKLISEEDLNGAAHHHHHH

SEQ ID NO: 251 - protein, 141 aa, Artificial Sequence
  Nanobody sequence
EVQLVESGGGLVQPGGSLRLSCAASGSIGGLNAMAWYRQAPGKERELVAGIFGVGSTRYADSVKGRFTISRDISKNTVFLQMNSLRSEDTAVYYCAMSSVTRGSSDYWGQGTLVTVSSAAAEQKLISEEDLNGAAHHHHHH

SEQ ID NO: 252 - protein, 141 aa, Artificial Sequence
  Nanobody sequence
EVQLVESGGGLVQPGGSLRLSCAASGSIGGLNAMAWYRQAPGKERELVAGIFGVGSTRYADSVKGRFTISRDNSKNTVYLQMNSLRSEDTAVYYCRMSSVTRGSSDYWGQGTLVTVSSAAAEQKLISEEDLNGAAHHHHHH

SEQ ID NO: 253 - protein, 141 aa, Artificial Sequence
  Nanobody sequence
EVQLVESGGGLVQPGGSLRLSCAASGSIGGLNAMAWYRQAPGKERELVAGIFGVGSTRYADSVKGRFTISRDNSKNTVFLQMNSLRSEDTAVYYCAMSSVTRGSSDYWGQGTLVTVSSAAAEQKLISEEDLNGAAHHHHHH

SEQ ID NO: 254 - protein, 141 aa, Artificial Sequence
  Nanobody sequence
EVQLVESGGGLVQPGGSLRLSCAASGSIGGLNAMAWYRQAPGKERELVAGIFGVGSTRYADSVKGRFTISRDISKNTVYLQMNSLRSEDTAVYYCAMSSVTRGSSDYWGQGTLVTVSSAAAEQKLISEEDLNGAAHHHHHH

SEQ ID NO: 255 - protein, 141 aa, Artificial Sequence
  Nanobody sequence
EVQLVESGGGLVQPGGSLRLSCAASGSIGGLNAMAWYRQAPGKERELVAGIFGVGSTRYADSVKGRFTISRDNSKNTVYLQMNSLRSEDTAVYYCAMSSVTRGSSDYWGQGTLVTVSSAAAEQKLISEEDLNGAAHHHHHH

SEQ ID NO: 256 - protein, 141 aa, Artificial Sequence
  Nanobody sequence
EVQLVESGGGLVQPGGSLRLSCAASGSIGGLNAMAWYRQAPGKERELVAGIFGVGSTRYADSVKGRFTISRDISKNTVFLQMNSLRPEDTAVYYCRMSSVTRGSSDYWGQGTLVTVSSAAAEQKLISEEDLNGAAHHHHHH

SEQ ID NO: 257 - protein, 141 aa, Artificial Sequence
  Nanobody sequence
EVQLVESGGGLVQPGGSLRLSCAASGSIGGLNAMAWYRQAPGKERELVAGIFGVGSTRYADSVKGRFTISRDISKNTVFLQMNSLRAEDTAVYYCRMSSVTRGSSDYWGQGTLVTVSSAAAEQKLISEEDLNGAAHHHHHH

SEQ ID NO: 258 - protein, 148 aa, Artificial Sequence
  Nanobody sequence
EVQLVESGGGLVQAGGSLRLSCAASGRTYYLNAMGWFRQGPGKDREFVAAIDWSYGNKDYADSVKGRFTISRDNAKNTVYLQMNSLKPEDTAVYYCAADTPPWGPMIYIESYDSWGQGTLVTVSSAAAEQKLISEEDLNGAAHHHHHH

SEQ ID NO: 259 - protein, 148 aa, Artificial Sequence
  Nanobody sequence
EVQLVESGGGLVQAGGSLRLSCAASGRTYYLNAMGWFRQGPGKDREFVAAIDWSEGNKDYADSVKGRFTISRDNAKNTVYLQMNSLKPEDTAVYYCAADTPPWGPMIYIESYDSWGQGTLVTVSSAAAEQKLISEEDLNGAAHHHHHH

SEQ ID NO: 260 - protein, 148 aa, Artificial Sequence
  Nanobody sequence
EVQLVESGGGLVQAGGSLRLSCAASGRTYYLNAMGWFRQGPGKDREFVAAIDWSDANKDYADSVKGRFTISRDNAKNTVYLQMNSLKPEDTAVYYCAADTPPWGPMIYIESYDSWGQGTLVTVSSAAAEQKLISEEDLNGAAHHHHHH

SEQ ID NO: 261 - protein, 148 aa, Artificial Sequence
  Nanobody sequence
EVQLVESGGGLVQAGGSLRLSCAASGRTYYLNAMGWFRQGPGKDREFVAAIDWSDGNKDYADSVKGRFTISRDNAKNTVYLQMNSLKPEDTAVYYCAADTPPWGPFIYIESYDSWGQGTLVTVSSAAAEQKLISEEDLNGAAHHHHHH

SEQ ID NO: 262 - protein, 148 aa, Artificial Sequence
  Nanobody sequence
EVQLVESGGGLVQAGGSLRLSCAASGRTYYLNAMGWFRQGPGKDREFVAAIDWSDGNKDYADSVKGRFTISRDNAKNTVYLQMNSLKPEDTAVYYCAADTPPWGPYIYIESYDSWGQGTLVTVSSAAAEQKLISEEDLNGAAHHHHHH

SEQ ID NO: 263 - protein, 148 aa, Artificial Sequence
  Nanobody sequence
EVQLVESGGGLVQAGGSLRLSCAASGRTYYLNAMGWFRQGPGKDREFVAAIDWSDGNKDYADSVKGRFTISRDNAKNTVYLQMNSLKPEDTAVYYCAADTPPWGPLIYIESYDSWGQGTLVTVSSAAAEQKLISEEDLNGAAHHHHHH

SEQ ID NO: 264 - protein, 148 aa, Artificial Sequence
  Nanobody sequence
EVQLVESGGGLVQAGGSLRLSCAASGRTYYLNAMGWFRQGPGKDREFVAAIDWSDGNKDYADSVKGRFTISRDNAKNTVYLQMNSLKPEDTAVYYCAADTPPWGPMIYIESYQSWGQGTLVTVSSAAAEQKLISEEDLNGAAHHHHHH

SEQ ID NO: 265 - protein, 148 aa, Artificial Sequence
  Nanobody sequence
EVQLVESGGGLVQAGGSLRLSCAASGRTYYLNAMGWFRQGPGKDREFVAAIDWSDGNKDYADSVKGRFTISRDNAKNTVYLQMNSLKPEDTAVYYCAADTPPWGPMIYIESYESWGQGTLVTVSSAAAEQKLISEEDLNGAAHHHHHH

SEQ ID NO: 266 - protein, 148 aa, Artificial Sequence
  Nanobody sequence
EVQLVESGGGLVQAGGSLRLSCAASGRTYYLNAMGWFRQGPGKDREFVAAIDWSDGNKDYADSVKGRFTISRDNAKNTVYLQMNSLKPEDTAVYYCAADTPPWGPMIYIESYDDWGQGTLVTVSSAAAEQKLISEEDLNGAAHHHHHH

SEQ ID NO: 267 - protein, 148 aa, Artificial Sequence
  Nanobody sequence
EVQLVESGGGLVQAGGSLRLSCAASGRTYYLNAMGWFRQGPGKDREFVAAIDWSDGNKDYADSVKGRFTISRDNAKNTVYLQMNSLKPEDTAVYYCAADTPPWGPMIYIESYDEWGQGTLVTVSSAAAEQKLISEEDLNGAAHHHHHH

SEQ ID NO: 268 - protein, 148 aa, Artificial Sequence
  Nanobody sequence
EVQLVESGGGLVQAGGSLRLSCAASGRTYYLNAMGWFRQGPGKDREFVAAIDWSDGNKDYADSVKGRFTISRDNAKNTVYLQMNSLKPEDTAVYYCAADTPPWGPMIYIESYDTWGQGTLVTVSSAAAEQKLISEEDLNGAAHHHHHH

SEQ ID NO: 269 - protein, 141 aa, Artificial Sequence
  Nanobody sequence
EVQLVESGGGLVQPGGSLRLSCAASGSIGGLNAMAWYRQAPGKERELVAGIFGVGSTRYADSVKGRFTISRDNSKNTVYLQMNSLRAEDTAVYYCRMSSVTRGSSDYWGQGTLVTVSSAAAEQKLISEEDLNGAAHHHHHH

SEQ ID NO: 270 - protein, 141 aa, Artificial Sequence
  Nanobody sequence
EVQLVESGGGLVQPGGSLRLSCAASGSIGGLNAMAWYRQAPGKERELVAGIFGVGSTRYADSVKGRFTISRDNSKNTVYLQMNSLRPEDTAVYYCRMSSVTRGSSDYWGQGTLVTVSSAAAEQKLISEEDLNGAAHHHHHH

SEQ ID NO: 271 - protein, 141 aa, Artificial Sequence
  Nanobody sequence
DVQLVESGGGLVQPGGSLRLSCAASGSIGGLNAMAWYRQAPGKERELVAGIFGVGSTRYADSVKGRFTISRDNSKNTVYLQMNSLRAEDTAVYYCRMSSVTRGSSDYWGQGTLVTVSSAAAEQKLISEEDLNGAAHHHHHH

SEQ ID NO: 272 - protein, 141 aa, Artificial Sequence
  Nanobody sequence
DVQLVESGGGLVQPGGSLRLSCAASGSIGGLNAMAWYRQAPGKERELVAGIFGVGSTRYADSVKGRFTISRDNSKNTVYLQMNSLRPEDTAVYYCRMSSVTRGSSDYWGQGTLVTVSSAAAEQKLISEEDLNGAAHHHHHH

SEQ ID NO: 273 - protein, 143 aa, Artificial Sequence
  Nanobody sequence
EVQLVESGGGLVQPGGSLRLSCAASGSIFRINAMAWYRQAPGKQRELVAEITAGGSTNYADSVKGRFTISRDNSWNTLYLQMNSLRPEDTAVYYCNLDHYTTWDRRSAYWGQGTLVTVSSAAAEQKLISEEDLNGAAHHHHHH

SEQ ID NO: 274 - protein, 143 aa, Artificial Sequence
  Nanobody sequence
EVQLVESGGGLVQPGGSLRLSCAASGSIFRINAMAWYRQAPGKQRELVAEITAGGSTNYADSVKGRFTISRDNSWNTLYLQMNSLRAEDTAVYYCNLDHYTTWDRRSAYWGQGTLVTVSSAAAEQKLISEEDLNGAAHHHHHH

SEQ ID NO: 275 - protein, 145 aa, Artificial Sequence
  Nanobody sequence
EVQLVESGGGLVQPGGSLRLSCAASGTLFKINAMGWYRQAPGKQRELVALITSSDTTDYAEDVKGRFTISRDNSWNTVYLQMNSLRPEDTAVYYCHSDHYSLGVPEKRVILYGQGTLVTVSSAAAEQKLISEEDLNGAAHHHHHH

SEQ ID NO: 276 - protein, 143 aa, Artificial Sequence
  Nanobody sequence
DVQLVESGGGLVQPGGSLRLSCAASGSIFRINAMAWYRQAPGKQRELVAEITAGGSTNYADSVKGRFTISRDNSWNTLYLQMNSLRPEDTAVYYCNLDHYTTWDRRSAYWGQGTLVTVSSAAAEQKLISEEDLNGAAHHHHHH

SEQ ID NO: 277 - protein, 143 aa, Artificial Sequence
  Nanobody sequence
DVQLVESGGGLVQPGGSLRLSCAASGSIFRINAMAWYRQAPGKQRELVAEITAGGSTNYADSVKGRFTISRDNSWNTLYLQMNSLRAEDTAVYYCNLDHYTTWDRRSAYWGQGTLVTVSSAAAEQKLISEEDLNGAAHHHHHH

SEQ ID NO: 278 - protein, 136 aa, Artificial Sequence
  Nanobody sequence
EVQLVESGGGLVQPGGSLRLSCAASGFTFSSYPMSWVRQAPGKGPEWVSTVSPGGITTSYADSVKGRFTISRDNSKNTLYLQMNSLRPEDTAVYYCLRDLGNRGQGTLVTVSSAAAEQKLISEEDLNGAAHHHHHH

SEQ ID NO: 279 - protein, 136 aa, Artificial Sequence
  Nanobody sequence
EVQLVESGGGLVQPGGSLRLSCAASGFTFSSYPMSWVRQAPGKGPAWVSTVSPGGITTSYADSVKGRFTISRDNSKNTLYLQMNSLRPEDTAVYYCLRDLGNRGQGTLVTVSSAAAEQKLISEEDLNGAAHHHHHH

SEQ ID NO: 280 - protein, 136 aa, Artificial Sequence
  Nanobody sequence
EVQLVESGGGLVQPGGSLRLSCAASGFTFSSYPMSWVRQAPGKGPEWVSTVSPGGITTSYADSVKGRFTISRDNSKNTLYLQMNSLRPEDTAVYYCLRDLSNRGQGTLVTVSSAAAEQKLISEEDLNGAAHHHHHH

SEQ ID NO: 281 - protein, 136 aa, Artificial Sequence
  Nanobody sequence
EVQLVESGGGLVQPGGSLRLSCAASGFTFSSYPMSWVRQAPGKGPAWVSTVSPGGITTSYADSVKGRFTISRDNSKNTLYLQMNSLRPEDTAVYYCLRDLSNRGQGTLVTVSSAAAEQKLISEEDLNGAAHHHHHH

SEQ ID NO: 282 - protein, 376 aa, Artificial Sequence
  Nanobody sequence
DVQLVESGGGLVQPGGSLRLSCAASGSIGGLNAMAWYRQAPGKERELVAGIFGVGSTRYADSVKGRFTISRDNSKNTVYLQMNSLRPEDTAVYYCRMSSVTRGSSDYWGQGTLVTVSSGGGGSGGGSEVQLVESGGGLVQPGNSLRLSCAASGFTFSSFGMSWVRQAPGKGLEWVSSISGSGSDTLYADSVKGRFTISRDNAKTTLYLQMNSLRPEDTAVYYCTIGGSLSRSSQGTLVTVSSGGGGSGGGSEVQLVESGGGLVQPGGSLRLSCAASGRTYYLNAMGWFRQAPGKEREFVAAIDWSEGNKDYADSVKGRFTISRDNSKNTVYLQMNSLRPEDTAVYYCAADTPPWGPLIYIESYDSWGQGTLVTVSS

SEQ ID NO: 283 - protein, 428 aa, Artificial Sequence
  Nanobody sequence
DVQLVESGGGLVQPGGSLRLSCAASGSIGGLNAMAWYRQAPGKERELVAGIFGVGSTRYADSVKGRFTISRDNSKNTVYLQMNSLRPEDTAVYYCRMSSVTRGSSDYWGQGTLVTVSSGGGGSGGGGSGGGGSGGGGSGGGGSGGGGSGGGGSEVQLVESGGGLVQPGNSLRLSCAASGFTFSSFGMSWVRQAPGKGLEWVSSISGSGSDTLYADSVKGRFTISRDNAKTTLYLQMNSLRPEDTAVYYCTIGGSLSRSSQGTLVTVSSGGGGSGGGGSGGGGSGGGGSGGGGSGGGGSGGGGSEVQLVESGGGLVQPGGSLRLSCAASGRTYYLNAMGWFRQAPGKEREFVAAIDWSEGNKDYADSVKGRFTISRDNSKNTVYLQMNSLRPEDTAVYYCAADTPPWGPLIYIESYDSWGQGTLVTVSS

SEQ ID NO: 284 - protein, 376 aa, Artificial Sequence
  Nanobody sequence
DVQLVESGGGLVQPGGSLRLSCAASGSIGGLNAMAWYRQAPGKERELVAGIFGVGSTRYADSVKGRFTISRDNSKNTVYLQMNSLRPEDTAVYYCRMSSVTRGSSDYWGQGTLVTVSSGGGGSGGGSEVQLVESGGGLVQPGGSLRLSCAASGRTYYLNAMGWFRQAPGKEREFVAAIDWSEGNKDYADSVKGRFTISRDNSKNTVYLQMNSLRPEDTAVYYCAADTPPWGPLIYIESYDSWGQGTLVTVSSGGGGSGGGSEVQLVESGGGLVQPGNSLRLSCAASGFTFSSFGMSWVRQAPGKGLEWVSSISGSGSDTLYADSVKGRFTISRDNAKTTLYLQMNSLRPEDTAVYYCTIGGSLSRSSQGTLVTVSS

SEQ ID NO: 285 - protein, 428 aa, Artificial Sequence
  Nanobody sequence
DVQLVESGGGLVQPGGSLRLSCAASGSIGGLNAMAWYRQAPGKERELVAGIFGVGSTRYADSVKGRFTISRDNSKNTVYLQMNSLRPEDTAVYYCRMSSVTRGSSDYWGQGTLVTVSSGGGGSGGGGSGGGGSGGGGSGGGGSGGGGSGGGGSEVQLVESGGGLVQPGGSLRLSCAASGRTYYLNAMGWFRQAPGKEREFVAAIDWSEGNKDYADSVKGRFTISRDNSKNTVYLQMNSLRPEDTAVYYCAADTPPWGPLIYIESYDSWGQGTLVTVSSGGGGSGGGGSGGGGSGGGGSGGGGSGGGGSGGGGSEVQLVESGGGLVQPGNSLRLSCAASGFTFSSFGMSWVRQAPGKGLEWVSSISGSGSDTLYADSVKGRFTISRDNAKTTLYLQMNSLRPEDTAVYYCTIGGSLSRSSQGTLVTVSS

SEQ ID NO: 286 - protein, 371 aa, Artificial Sequence
  Nanobody sequence
DVQLVESGGGLVQPGGSLRLSCAASGSIGGLNAMAWYRQAPGKERELVAGIFGVGSTRYADSVKGRFTISRDNSKNTVYLQMNSLRPEDTAVYYCRMSSVTRGSSDYWGQGTLVTVSSGGGGSGGGSEVQLVESGGGLVQPGNSLRLSCAASGFTFSSFGMSWVRQAPGKGLEWVSSISGSGSDTLYADSVKGRFTISRDNAKTTLYLQMNSLRPEDTAVYYCTIGGSLSRSSQGTLVTVSSGGGGSGGGSEVQLVESGGGLVQPGGSLRLSCAASGSIFRINAMAWYRQAPGKQRELVAEITAGGSTNYADSVKGRFTISRDNSWNTLYLQMNSLRPEDTAVYYCNLDHYTTWDRRSAYWGQGTLVTVSS

SEQ ID NO: 287 - protein, 423 aa, Artificial Sequence
  Nanobody sequence
DVQLVESGGGLVQPGGSLRLSCAASGSIGGLNAMAWYRQAPGKERELVAGIFGVGSTRYADSVKGRFTISRDNSKNTVYLQMNSLRPEDTAVYYCRMSSVTRGSSDYWGQGTLVTVSSGGGGSGGGGSGGGGSGGGGSGGGGSGGGGSGGGGSEVQLVESGGGLVQPGNSLRLSCAASGFTFSSFGMSWVRQAPGKGLEWVSSISGSGSDTLYADSVKGRFTISRDNAKTTLYLQMNSLRPEDTAVYYCTIGGSLSRSSQGTLVTVSSGGGGSGGGGSGGGGSGGGGSGGGGSGGGGSGGGGSEVQLVESGGGLVQPGGSLRLSCAASGSIFRINAMAWYRQAPGKQRELVAEITAGGSTNYADSVKGRFTISRDNSWNTLYLQMNSLRPEDTAVYYCNLDHYTTWDRRSAYWGQGTLVTVSS

SEQ ID NO: 288 - protein, 371 aa, Artificial Sequence
  Nanobody sequence
DVQLVESGGGLVQPGGSLRLSCAASGSIGGLNAMAWYRQAPGKERELVAGIFGVGSTRYADSVKGRFTISRDNSKNTVYLQMNSLRPEDTAVYYCRMSSVTRGSSDYWGQGTLVTVSSGGGGSGGGSEVQLVESGGGLVQPGGSLRLSCAASGSIFRINAMAWYRQAPGKQRELVAEITAGGSTNYADSVKGRFTISRDNSWNTLYLQMNSLRPEDTAVYYCNLDHYTTWDRRSAYWGQGTLVTVSSGGGGSGGGSEVQLVESGGGLVQPGNSLRLSCAASGFTFSSFGMSWVRQAPGKGLEWVSSISGSGSDTLYADSVKGRFTISRDNAKTTLYLQMNSLRPEDTAVYYCTIGGSLSRSSQGTLVTVSS

SEQ ID NO: 289 - protein, 423 aa, Artificial Sequence
  Nanobody sequence
DVQLVESGGGLVQPGGSLRLSCAASGSIGGLNAMAWYRQAPGKERELVAGIFGVGSTRYADSVKGRFTISRDNSKNTVYLQMNSLRPEDTAVYYCRMSSVTRGSSDYWGQGTLVTVSSGGGGSGGGGSGGGGSGGGGSGGGGSGGGGSGGGGSEVQLVESGGGLVQPGGSLRLSCAASGSIFRINAMAWYRQAPGKQRELVAEITAGGSTNYADSVKGRFTISRDNSWNTLYLQMNSLRPEDTAVYYCNLDHYTTWDRRSAYWGQGTLVTVSSGGGGSGGGGSGGGGSGGGGSGGGGSGGGGSGGGGSEVQLVESGGGLVQPGNSLRLSCAASGFTFSSFGMSWVRQAPGKGLEWVSSISGSGSDTLYADSVKGRFTISRDNAKTTLYLQMNSLRPEDTAVYYCTIGGSLSRSSQGTLVTVSS

SEQ ID NO: 290 - protein, 373 aa, Artificial Sequence
  Nanobody sequence
DVQLVESGGGLVQPGGSLRLSCAASGSIGGLNAMAWYRQAPGKERELVAGIFGVGSTRYADSVKGRFTISRDNSKNTVYLQMNSLRPEDTAVYYCRMSSVTRGSSDYWGQGTLVTVSSGGGGSGGGSEVQLVESGGGLVQPGNSLRLSCAASGFTFSSFGMSWVRQAPGKGLEWVSSISGSGSDTLYADSVKGRFTISRDNAKTTLYLQMNSLRPEDTAVYYCTIGGSLSRSSQGTLVTVSSGGGGSGGGSEVQLVESGGGLVQPGGSLRLSCAASGTLFKINAMGWYRQAPGKRRELVALITSSDTTDYAEDVKGRFTISRDNSWNTVYLQMNSLRPEDTAVYYCHSDHYSLGVPEKRVILYGQGTLVTVSS

SEQ ID NO: 291 - protein, 425 aa, Artificial Sequence
  Nanobody sequence
DVQLVESGGGLVQPGGSLRLSCAASGSIGGLNAMAWYRQAPGKERELVAGIFGVGSTRYADSVKGRFTISRDNSKNTVYLQMNSLRPEDTAVYYCRMSSVTRGSSDYWGQGTLVTVSSGGGGSGGGGSGGGGSGGGGSGGGGSGGGGSGGGGSEVQLVESGGGLVQPGNSLRLSCAASGFTFSSFGMSWVRQAPGKGLEWVSSISGSGSDTLYADSVKGRFTISRDNAKTTLYLQMNSLRPEDTAVYYCTIGGSLSRSSQGTLVTVSSGGGGSGGGGSGGGGSGGGGSGGGGSGGGGSGGGGSEVQLVESGGGLVQPGGSLRLSCAASGTLFKINAMGWYRQAPGKRRELVALITSSDTTDYAEDVKGRFTISRDNSWNTVYLQMNSLRPEDTAVYYCHSDHYSLGVPEKRVILYGQGTLVTVSS

SEQ ID NO: 292 - protein, 373 aa, Artificial Sequence
  Nanobody sequence
DVQLVESGGGLVQPGGSLRLSCAASGSIGGLNAMAWYRQAPGKERELVAGIFGVGSTRYADSVKGRFTISRDNSKNTVYLQMNSLRPEDTAVYYCRMSSVTRGSSDYWGQGTLVTVSSGGGGSGGGSEVQLVESGGGLVQPGGSLRLSCAASGTLFKINAMGWYRQAPGKRRELVALITSSDTTDYAEDVKGRFTISRDNSWNTVYLQMNSLRPEDTAVYYCHSDHYSLGVPEKRVILYGQGTLVTVSSGGGGSGGGSEVQLVESGGGLVQPGNSLRLSCAASGFTFSSFGMSWVRQAPGKGLEWVSSISGSGSDTLYADSVKGRFTISRDNAKTTLYLQMNSLRPEDTAVYYCTIGGSLSRSSQGTLVTVSS

SEQ ID NO: 293 - protein, 425 aa, Artificial Sequence
  Nanobody sequence
DVQLVESGGGLVQPGGSLRLSCAASGSIGGLNAMAWYRQAPGKERELVAGIFGVGSTRYADSVKGRFTISRDNSKNTVYLQMNSLRPEDTAVYYCRMSSVTRGSSDYWGQGTLVTVSSGGGGSGGGGSGGGGSGGGGSGGGGSGGGGSGGGGSEVQLVESGGGLVQPGGSLRLSCAASGTLFKINAMGWYRQAPGKRRELVALITSSDTTDYAEDVKGRFTISRDNSWNTVYLQMNSLRPEDTAVYYCHSDHYSLGVPEKRVILYGQGTLVTVSSGGGGSGGGGSGGGGSGGGGSGGGGSGGGGSGGGGSEVQLVESGGGLVQPGNSLRLSCAASGFTFSSFGMSWVRQAPGKGLEWVSSISGSGSDTLYADSVKGRFTISRDNAKTTLYLQMNSLRPEDTAVYYCTIGGSLSRSSQGTLVTVSS

SEQ ID NO: 294 - protein, 418 aa, Artificial Sequence
  Nanobody sequence
EVQLVESGGGLVQPGGSLRLSCAASGFTFSSYPMSWVRQAPGKGPEWVSTVSPGGITTSYADSVKGRFTISRDNSKNTLYLQMNSLRPEDTAVYYCLRDLGNRGQGTLVTVSSGGGGSGGGGSGGGGSGGGGSGGGGSGGGGSGGGGSEVQLVESGGGLVQPGNSLRLSCAASGFTFSSFGMSWVRQAPGKGLEWVSSISGSGSDTLYADSVKGRFTISRDNAKTTLYLQMNSLRPEDTAVYYCTIGGSLSRSSQGTLVTVSSGGGGSGGGGSGGGGSGGGGSGGGGSGGGGSGGGGSEVQLVESGGGLVQPGGSLRLSCAASGSIFRINAMAWYRQAPGKQRELVAEITAGGSTNYADSVKGRFTISRDNSWNTLYLQMNSLRPEDTAVYYCNLDHYTTWDRRSAYWGQGTLVTVSS

SEQ ID NO: 295 - protein, 418 aa, Artificial Sequence
  Nanobody sequence
EVQLVESGGGLVQPGGSLRLSCAASGFTFSSYPMSWVRQAPGKGPAWVSTVSPGGITTSYADSVKGRFTISRDNSKNTLYLQMNSLRPEDTAVYYCLRDLGNRGQGTLVTVSSGGGGSGGGGSGGGGSGGGGSGGGGSGGGGSGGGGSEVQLVESGGGLVQPGNSLRLSCAASGFTFSSFGMSWVRQAPGKGLEWVSSISGSGSDTLYADSVKGRFTISRDNAKTTLYLQMNSLRPEDTAVYYCTIGGSLSRSSQGTLVTVSSGGGGSGGGGSGGGGSGGGGSGGGGSGGGGSGGGGSEVQLVESGGGLVQPGGSLRLSCAASGSIFRINAMAWYRQAPGKQRELVAEITAGGSTNYADSVKGRFTISRDNSWNTLYLQMNSLRPEDTAVYYCNLDHYTTWDRRSAYWGQGTLVTVSS

SEQ ID NO: 296 - protein, 418 aa, Artificial Sequence
  Nanobody sequence
EVQLVESGGGLVQPGGSLRLSCAASGFTFSSYPMSWVRQAPGKGPEWVSTVSPGGITTSYADSVKGRFTISRDNSKNTLYLQMNSLRPEDTAVYYCLRDLGNRGQGTLVTVSSGGGGSGGGGSGGGGSGGGGSGGGGSGGGGSGGGGSEVQLVESGGGLVQPGGSLRLSCAASGSIFRINAMAWYRQAPGKQRELVAEITAGGSTNYADSVKGRFTISRDNSWNTLYLQMNSLRPEDTAVYYCNLDHYTTWDRRSAYWGQGTLVTVSSGGGGSGGGGSGGGGSGGGGSGGGGSGGGGSGGGGSEVQLVESGGGLVQPGNSLRLSCAASGFTFSSFGMSWVRQAPGKGLEWVSSISGSGSDTLYADSVKGRFTISRDNAKTTLYLQMNSLRPEDTAVYYCTIGGSLSRSSQGTLVTVSS

SEQ ID NO: 297 - protein, 418 aa, Artificial Sequence
  Nanobody sequence
EVQLVESGGGLVQPGGSLRLSCAASGFTFSSYPMSWVRQAPGKGPAWVSTVSPGGITTSYADSVKGRFTISRDNSKNTLYLQMNSLRPEDTAVYYCLRDLGNRGQGTLVTVSSGGGGSGGGGSGGGGSGGGGSGGGGSGGGGSGGGGSEVQLVESGGGLVQPGGSLRLSCAASGSIFRINAMAWYRQAPGKQRELVAEITAGGSTNYADSVKGRFTISRDNSWNTLYLQMNSLRPEDTAVYYCNLDHYTTWDRRSAYWGQGTLVTVSSGGGGSGGGGSGGGGSGGGGSGGGGSGGGGSGGGGSEVQLVESGGGLVQPGNSLRLSCAASGFTFSSFGMSWVRQAPGKGLEWVSSISGSGSDTLYADSVKGRFTISRDNAKTTLYLQMNSLRPEDTAVYYCTIGGSLSRSSQGTLVTVSS

SEQ ID NO: 298 - protein, 418 aa, Artificial Sequence
  Nanobody sequence
DVQLVESGGGLVQPGGSLRLSCAASGSIFRINAMAWYRQAPGKQRELVAEITAGGSTNYADSVKGRFTISRDNSWNTLYLQMNSLRPEDTAVYYCNLDHYTTWDRRSAYWGQGTLVTVSSGGGGSGGGGSGGGGSGGGGSGGGGSGGGGSGGGGSEVQLVESGGGLVQPGNSLRLSCAASGFTFSSFGMSWVRQAPGKGLEWVSSISGSGSDTLYADSVKGRFTISRDNAKTTLYLQMNSLRPEDTAVYYCTIGGSLSRSSQGTLVTVSSGGGGSGGGGSGGGGSGGGGSGGGGSGGGGSGGGGSEVQLVESGGGLVQPGGSLRLSCAASGFTFSSYPMSWVRQAPGKGPEWVSTVSPGGITTSYADSVKGRFTISRDNSKNTLYLQMNSLRPEDTAVYYCLRDLGNRGQGTLVTVSS

SEQ ID NO: 299 - protein, 418 aa, Artificial Sequence
  Nanobody sequence
DVQLVESGGGLVQPGGSLRLSCAASGSIFRINAMAWYRQAPGKQRELVAEITAGGSTNYADSVKGRFTISRDNSWNTLYLQMNSLRPEDTAVYYCNLDHYTTWDRRSAYWGQGTLVTVSSGGGGSGGGGSGGGGSGGGGSGGGGSGGGGSGGGGSEVQLVESGGGLVQPGNSLRLSCAASGFTFSSFGMSWVRQAPGKGLEWVSSISGSGSDTLYADSVKGRFTISRDNAKTTLYLQMNSLRPEDTAVYYCTIGGSLSRSSQGTLVTVSSGGGGSGGGGSGGGGSGGGGSGGGGSGGGGSGGGGSEVQLVESGGGLVQPGGSLRLSCAASGFTFSSYPMSWVRQAPGKGPAWVSTVSPGGITTSYADSVKGRFTISRDNSKNTLYLQMNSLRPEDTAVYYCLRDLGNRGQGTLVTVSS

SEQ ID NO: 300 - protein, 418 aa, Artificial Sequence
  Nanobody sequence
DVQLVESGGGLVQPGGSLRLSCAASGSIFRINAMAWYRQAPGKQRELVAEITAGGSTNYADSVKGRFTISRDNSWNTLYLQMNSLRPEDTAVYYCNLDHYTTWDRRSAYWGQGTLVTVSSGGGGSGGGGSGGGGSGGGGSGGGGSGGGGSGGGGSEVQLVESGGGLVQPGGSLRLSCAASGFTFSSYPMSWVRQAPGKGPEWVSTVSPGGITTSYADSVKGRFTISRDNSKNTLYLQMNSLRPEDTAVYYCLRDLGNRGQGTLVTVSSGGGGSGGGGSGGGGSGGGGSGGGGSGGGGSGGGGSEVQLVESGGGLVQPGNSLRLSCAASGFTFSSFGMSWVRQAPGKGLEWVSSISGSGSDTLYADSVKGRFTISRDNAKTTLYLQMNSLRPEDTAVYYCTIGGSLSRSSQGTLVTVSS

SEQ ID NO: 301 - protein, 418 aa, Artificial Sequence
  Nanobody sequence
DVQLVESGGGLVQPGGSLRLSCAASGSIFRINAMAWYRQAPGKQRELVAEITAGGSTNYADSVKGRFTISRDNSWNTLYLQMNSLRPEDTAVYYCNLDHYTTWDRRSAYWGQGTLVTVSSGGGGSGGGGSGGGGSGGGGSGGGGSGGGGSGGGGSEVQLVESGGGLVQPGGSLRLSCAASGFTFSSYPMSWVRQAPGKGPAWVSTVSPGGITTSYADSVKGRFTISRDNSKNTLYLQMNSLRPEDTAVYYCLRDLGNRGQGTLVTVSSGGGGSGGGGSGGGGSGGGGSGGGGSGGGGSGGGGSEVQLVESGGGLVQPGNSLRLSCAASGFTFSSFGMSWVRQAPGKGLEWVSSISGSGSDTLYADSVKGRFTISRDNAKTTLYLQMNSLRPEDTAVYYCTIGGSLSRSSQGTLVTVSS

SEQ ID NO: 302 - protein, 420 aa, Artificial Sequence
  Nanobody sequence
EVQLVESGGGLVQPGGSLRLSCAASGFTFSSYPMSWVRQAPGKGPEWVSTVSPGGITTSYADSVKGRFTISRDNSKNTLYLQMNSLRPEDTAVYYCLRDLGNRGQGTLVTVSSGGGGSGGGGSGGGGSGGGGSGGGGSGGGGSGGGGSEVQLVESGGGLVQPGNSLRLSCAASGFTFSSFGMSWVRQAPGKGLEWVSSISGSGSDTLYADSVKGRFTISRDNAKTTLYLQMNSLRPEDTAVYYCTIGGSLSRSSQGTLVTVSSGGGGSGGGGSGGGGSGGGGSGGGGSGGGGSGGGGSEVQLVESGGGLVQPGGSLRLSCAASGTLFKINAMGWYRQAPGKRRELVALITSSDTTDYAEDVKGRFTISRDNSWNTVYLQMNSLRPEDTAVYYCHSDHYSLGVPEKRVILYGQGTLVTVSS

SEQ ID NO: 303 - protein, 420 aa, Artificial Sequence
  Nanobody sequence
EVQLVESGGGLVQPGGSLRLSCAASGFTFSSYPMSWVRQAPGKGPAWVSTVSPGGITTSYADSVKGRFTISRDNSKNTLYLQMNSLRPEDTAVYYCLRDLGNRGQGTLVTVSSGGGGSGGGGSGGGGSGGGGSGGGGSGGGGSGGGGSEVQLVESGGGLVQPGNSLRLSCAASGFTFSSFGMSWVRQAPGKGLEWVSSISGSGSDTLYADSVKGRFTISRDNAKTTLYLQMNSLRPEDTAVYYCTIGGSLSRSSQGTLVTVSSGGGGSGGGGSGGGGSGGGGSGGGGSGGGGSGGGGSEVQLVESGGGLVQPGGSLRLSCAASGTLFKINAMGWYRQAPGKRRELVALITSSDTTDYAEDVKGRFTISRDNSWNTVYLQMNSLRPEDTAVYYCHSDHYSLGVPEKRVILYGQGTLVTVSS

SEQ ID NO: 304 - protein, 420 aa, Artificial Sequence
  Nanobody sequence
EVQLVESGGGLVQPGGSLRLSCAASGFTFSSYPMSWVRQAPGKGPEWVSTVSPGGITTSYADSVKGRFTISRDNSKNTLYLQMNSLRPEDTAVYYCLRDLGNRGQGTLVTVSSGGGGSGGGGSGGGGSGGGGSGGGGSGGGGSGGGGSEVQLVESGGGLVQPGGSLRLSCAASGTLFKINAMGWYRQAPGKRRELVALITSSDTTDYAEDVKGRFTISRDNSWNTVYLQMNSLRPEDTAVYYCHSDHYSLGVPEKRVILYGQGTLVTVSSGGGGSGGGGSGGGGSGGGGSGGGGSGGGGSGGGGSEVQLVESGGGLVQPGNSLRLSCAASGFTFSSFGMSWVRQAPGKGLEWVSSISGSGSDTLYADSVKGRFTISRDNAKTTLYLQMNSLRPEDTAVYYCTIGGSLSRSSQGTLVTVSS

SEQ ID NO: 305 - protein, 420 aa, Artificial Sequence
  Nanobody sequence
EVQLVESGGGLVQPGGSLRLSCAASGFTFSSYPMSWVRQAPGKGPAWVSTVSPGGITTSYADSVKGRFTISRDNSKNTLYLQMNSLRPEDTAVYYCLRDLGNRGQGTLVTVSSGGGGSGGGGSGGGGSGGGGSGGGGSGGGGSGGGGSEVQLVESGGGLVQPGGSLRLSCAASGTLFKINAMGWYRQAPGKRRELVALITSSDTTDYAEDVKGRFTISRDNSWNTVYLQMNSLRPEDTAVYYCHSDHYSLGVPEKRVILYGQGTLVTVSSGGGGSGGGGSGGGGSGGGGSGGGGSGGGGSGGGGSEVQLVESGGGLVQPGNSLRLSCAASGFTFSSFGMSWVRQAPGKGLEWVSSISGSGSDTLYADSVKGRFTISRDNAKTTLYLQMNSLRPEDTAVYYCTIGGSLSRSSQGTLVTVSS

SEQ ID NO: 306 - protein, 420 aa, Artificial Sequence
  Nanobody sequence
EVQLVESGGGLVQPGGSLRLSCAASGTLFKINAMGWYRQAPGKRRELVALITSSDTTDYAEDVKGRFTISRDNSWNTVYLQMNSLRPEDTAVYYCHSDHYSLGVPEKRVILYGQGTLVTVSSGGGGSGGGGSGGGGSGGGGSGGGGSGGGGSGGGGSEVQLVESGGGLVQPGNSLRLSCAASGFTFSSFGMSWVRQAPGKGLEWVSSISGSGSDTLYADSVKGRFTISRDNAKTTLYLQMNSLRPEDTAVYYCTIGGSLSRSSQGTLVTVSSGGGGSGGGGSGGGGSGGGGSGGGGSGGGGSGGGGSEVQLVESGGGLVQPGGSLRLSCAASGFTFSSYPMSWVRQAPGKGPEWVSTVSPGGITTSYADSVKGRFTISRDNSKNTLYLQMNSLRPEDTAVYYCLRDLGNRGQGTLVTVSS

SEQ ID NO: 307 - protein, 420 aa, Artificial Sequence
  Nanobody sequence
EVQLVESGGGLVQPGGSLRLSCAASGTLFKINAMGWYRQAPGKRRELVALITSSDTTDYAEDVKGRFTISRDNSWNTVYLQMNSLRPEDTAVYYCHSDHYSLGVPEKRVILYGQGTLVTVSSGGGGSGGGGSGGGGSGGGGSGGGGSGGGGSGGGGSEVQLVESGGGLVQPGNSLRLSCAASGFTFSSFGMSWVRQAPGKGLEWVSSISGSGSDTLYADSVKGRFTISRDNAKTTLYLQMNSLRPEDTAVYYCTIGGSLSRSSQGTLVTVSSGGGGSGGGGSGGGGSGGGGSGGGGSGGGGSGGGGSEVQLVESGGGLVQPGGSLRLSCAASGFTFSSYPMSWVRQAPGKGPAWVSTVSPGGITTSYADSVKGRFTISRDNSKNTLYLQMNSLRPEDTAVYYCLRDLGNRGQGTLVTVSS

SEQ ID NO: 308 - protein, 420 aa, Artificial Sequence
  Nanobody sequence
EVQLVESGGGLVQPGGSLRLSCAASGTLFKINAMGWYRQAPGKRRELVALITSSDTTDYAEDVKGRFTISRDNSWNTVYLQMNSLRPEDTAVYYCHSDHYSLGVPEKRVILYGQGTLVTVSSGGGGSGGGGSGGGGSGGGGSGGGGSGGGGSGGGGSEVQLVESGGGLVQPGGSLRLSCAASGFTFSSYPMSWVRQAPGKGPEWVSTVSPGGITTSYADSVKGRFTISRDNSKNTLYLQMNSLRPEDTAVYYCLRDLGNRGQGTLVTVSSGGGGSGGGGSGGGGSGGGGSGGGGSGGGGSGGGGSEVQLVESGGGLVQPGNSLRLSCAASGFTFSSFGMSWVRQAPGKGLEWVSSISGSGSDTLYADSVKGRFTISRDNAKTTLYLQMNSLRPEDTAVYYCTIGGSLSRSSQGTLVTVSS

SEQ ID NO: 309 - protein, 420 aa, Artificial Sequence
  Nanobody sequence
EVQLVESGGGLVQPGGSLRLSCAASGTLFKINAMGWYRQAPGKRRELVALITSSDTTDYAEDVKGRFTISRDNSWNTVYLQMNSLRPEDTAVYYCHSDHYSLGVPEKRVILYGQGTLVTVSSGGGGSGGGGSGGGGSGGGGSGGGGSGGGGSGGGGSEVQLVESGGGLVQPGGSLRLSCAASGFTFSSYPMSWVRQAPGKGPAWVSTVSPGGITTSYADSVKGRFTISRDNSKNTLYLQMNSLRPEDTAVYYCLRDLGNRGQGTLVTVSSGGGGSGGGGSGGGGSGGGGSGGGGSGGGGSGGGGSEVQLVESGGGLVQPGNSLRLSCAASGFTFSSFGMSWVRQAPGKGLEWVSSISGSGSDTLYADSVKGRFTISRDNAKTTLYLQMNSLRPEDTAVYYCTIGGSLSRSSQGTLVTVSS

SEQ ID NO: 310 - protein, 380 aa, Artificial Sequence
  Nanobody sequence
EVQLVESGGGLVQPGGSLRLSCAASGTLFKINAMGWYRQAPGKRRELVALITSSDTTDYAEDVKGRFTISRDNSWNTVYLQMNSLRPEDTAVYYCHSDHYSLGVPEKRVILYGQGTLVTVSSGGGGSGGGSEVQLVESGGGLVQPGNSLRLSCAASGFTFSSFGMSWVRQAPGKGLEWVSSISGSGSDTLYADSVKGRFTISRDNAKTTLYLQMNSLRPEDTAVYYCTIGGSLSRSSQGTLVTVSSGGGGSGGGSEVQLVESGGGLVQPGGSLRLSCAASGRTYYLNAMGWFRQAPGKEREFVAAIDWSEGNKDYADSVKGRFTISRDASKNTVYLQMNSLRPEDTAVYYCAADTPPWGPLIYIESYDSWGQGTLVTVSS

SEQ ID NO: 311 - protein, 380 aa, Artificial Sequence
  Nanobody sequence
EVQLVESGGGLVQPGGSLRLSCAASGTLFKINAMGWYRQAPGKRRELVALITSSDTTDYAEDVKGRFTISRDNSWNTVYLQMNSLRPEDTAVYYCHSDHYSLGVPEKRVILYGQGTLVTVSSGGGGSGGGSEVQLVESGGGLVQPGGSLRLSCAASGRTYYLNAMGWFRQAPGKEREFVAAIDWSEGNKDYADSVKGRFTISRDASKNTVYLQMNSLRPEDTAVYYCAADTPPWGPLIYIESYDSWGQGTLVTVSSGGGGSGGGSEVQLVESGGGLVQPGNSLRLSCAASGFTFSSFGMSWVRQAPGKGLEWVSSISGSGSDTLYADSVKGRFTISRDNAKTTLYLQMNSLRPEDTAVYYCTIGGSLSRSSQGTLVTVSS

SEQ ID NO: 312 - protein, 380 aa, Artificial Sequence
  Nanobody sequence
EVQLVESGGGLVQPGGSLRLSCAASGRTYYLNAMGWFRQAPGKEREFVAAIDWSEGNKDYADSVKGRFTISRDASKNTVYLQMNSLRPEDTAVYYCAADTPPWGPLIYIESYDSWGQGTLVTVSSGGGGSGGGSEVQLVESGGGLVQPGNSLRLSCAASGFTFSSFGMSWVRQAPGKGLEWVSSISGSGSDTLYADSVKGRFTISRDNAKTTLYLQMNSLRPEDTAVYYCTIGGSLSRSSQGTLVTVSSGGGGSGGGSEVQLVESGGGLVQPGGSLRLSCAASGTLFKINAMGWYRQAPGKRRELVALITSSDTTDYAEDVKGRFTISRDNSWNTVYLQMNSLRPEDTAVYYCHSDHYSLGVPEKRVILYGQGTLVTVSS

SEQ ID NO: 313 - protein, 380 aa, Artificial Sequence
  Nanobody sequence
EVQLVESGGGLVQPGGSLRLSCAASGRTYYLNAMGWFRQAPGKEREFVAAIDWSEGNKDYADSVKGRFTISRDASKNTVYLQMNSLRPEDTAVYYCAADTPPWGPLIYIESYDSWGQGTLVTVSSGGGGSGGGSEVQLVESGGGLVQPGGSLRLSCAASGTLFKINAMGWYRQAPGKRRELVALITSSDTTDYAEDVKGRFTISRDNSWNTVYLQMNSLRPEDTAVYYCHSDHYSLGVPEKRVILYGQGTLVTVSSGGGGSGGGSEVQLVESGGGLVQPGNSLRLSCAASGFTFSSFGMSWVRQAPGKGLEWVSSISGSGSDTLYADSVKGRFTISRDNAKTTLYLQMNSLRPEDTAVYYCTIGGSLSRSSQGTLVTVSS

SEQ ID NO: 314 - protein, 373 aa, Artificial Sequence
  Nanobody sequence
EVQLVESGGGLVQPGGSLRLSCAASGTLFKINAMGWYRQAPGKRRELVALITSSDTTDYAEDVKGRFTISRDNSWNTVYLQMNSLRPEDTAVYYCHSDHYSLGVPEKRVILYGQGTLVTVSSGGGGSGGGSEVQLVESGGGLVQPGNSLRLSCAASGFTFSSFGMSWVRQAPGKGLEWVSSISGSGSDTLYADSVKGRFTISRDNAKTTLYLQMNSLRPEDTAVYYCTIGGSLSRSSQGTLVTVSSGGGGSGGGSEVQLVESGGGLVQPGGSLRLSCAASGSIGGLNAMAWYRQAPGKERELVAGIFGVGSTRYADSVKGRFTISRDNSKNTVYLQMNSLRPEDTAVYYCRMSSVTRGSSDYWGQGTLVTVSS

SEQ ID NO: 315 - protein, 368 aa, Artificial Sequence
  Nanobody sequence
EVQLVESGGGLVQPGGSLRLSCAASGFTFSSYPMSWVRQAPGKGPEWVSTVSPGGITTSYADSVKGRFTISRDNSKNTLYLQMNSLRPEDTAVYYCLRDLGNRGQGTLVTVSSGGGGSGGGSEVQLVESGGGLVQPGNSLRLSCAASGFTFSSFGMSWVRQAPGKGLEWVSSISGSGSDTLYADSVKGRFTISRDNAKTTLYLQMNSLRPEDTAVYYCTIGGSLSRSSQGTLVTVSSGGGGSGGGSEVQLVESGGGLVQPGGSLRLSCAASGTLFKINAMGWYRQAPGKRRELVALITSSDTTDYAEDVKGRFTISRDNSWNTVYLQMNSLRPEDTAVYYCHSDHYSLGVPEKRVILYGQGTLVTVSS

SEQ ID NO: 316 - protein, 242 aa, Artificial Sequence
  Nanobody sequence
DVQLVESGGGLVQPGGSLRLSCAASGSIGGLNAMAWYRQAPGKERELVAGIFGVGSTRYADSVKGRFTISRDNSKNTVYLQMNSLRPEDTAVYYCRMSSVTRGSSDYWGQGTLVTVSSGGGGSGGGSEVQLVESGGGLVQPGNSLRLSCAASGFTFSSFGMSWVRQAPGKGLEWVSSISGSGSDTLYADSVKGRFTISRDNAKTTLYLQMNSLRPEDTAVYYCTIGGSLSRSSQGTLVTVSS

SEQ ID NO: 317 - protein, 380 aa, Artificial Sequence
  Nanobody sequence
EVQLVESGGGLVQPGGSLRLSCAASGRTYYLNAMGWFRQAPGKEREFVAAIDWSEGNKDYADSVKGRFTISRDNSKNTVYLQMNSLRPEDTAVYYCAADTPPWGPLIYIESYDSWGQGTLVTVSSGGGGSGGGSEVQLVESGGGLVQPGNSLRLSCAASGFTFSSFGMSWVRQAPGKGLEWVSSISGSGSDTLYADSVKGRFTISRDNAKTTLYLQMNSLRPEDTAVYYCTIGGSLSRSSQGTLVTVSSGGGGSGGGSEVQLVESGGGLVQPGGSLRLSCAASGTLFKINAMGWYRQAPGKRRELVALITSSDTTDYAEDVKGRFTISRDNSWNTVYLQMNSLRPEDTAVYYCHSDHYSLGVPEKRVILYGQGTLVTVSS

SEQ ID NO: 318 - protein, 145 aa, Artificial Sequence
  Nanobody sequence
EVQLVESGGGLVQPGGSLRLSCAASGTLFKINAMGWYRQAPGKRRELVALITSSDTTDYADSVKGRFTISRDNSWNTVYLQMNSLRPEDTAVYYCHSDHYSLGVPEKRVILYGQGTLVTVSSAAAEQKLISEEDLNGAAHHHHHH

SEQ ID NO: 319 - protein, 373 aa, Artificial Sequence
  Nanobody sequence
DVQLVESGGGLVQPGGSLRLSCAASGSIGGLNAMAWYRQAPGKERELVAGIFGVGSTRYADSVKGRFTISRDNSKNTVYLQMNSLRPEDTAVYYCRMSSVTRGSSDYWGQGTLVTVSSGGGGSGGGSEVQLVESGGGLVQPGNSLRLSCAASGFTFSSFGMSWVRQAPGKGLEWVSSISGSGSDTLYADSVKGRFTISRDNAKTTLYLQMNSLRPEDTAVYYCTIGGSLSRSSQGTLVTVSSGGGGSGGGSEVQLVESGGGLVQPGGSLRLSCAASGTLFKINAMGWYRQAPGKRRELVALITSSDTTDYADSVKGRFTISRDNSWNTVYLQMNSLRPEDTAVYYCHSDHYSLGVPEKRVILYGQGTLVTVSS

SEQ ID NO: 320 - protein, 368 aa, Artificial Sequence
  Nanobody sequence
EVQLVESGGGLVQPGGSLRLSCAASGFTFSSYPMSWVRQAPGKGPEWVSTVSPGGITTSYADSVKGRFTISRDNSKNTLYLQMNSLRPEDTAVYYCLRDLGNRGQGTLVTVSSGGGGSGGGSEVQLVESGGGLVQPGNSLRLSCAASGFTFSSFGMSWVRQAPGKGLEWVSSISGSGSDTLYADSVKGRFTISRDNAKTTLYLQMNSLRPEDTAVYYCTIGGSLSRSSQGTLVTVSSGGGGSGGGSEVQLVESGGGLVQPGGSLRLSCAASGTLFKINAMGWYRQAPGKRRELVALITSSDTTDYADSVKGRFTISRDNSWNTVYLQMNSLRPEDTAVYYCHSDHYSLGVPEKRVILYGQGTLVTVSS

SEQ ID NO: 321 - protein, 380 aa, Artificial Sequence
  Nanobody sequence
EVQLVESGGGLVQPGGSLRLSCAASGRTYYLNAMGWFRQAPGKEREFVAAIDWSEGNKDYADSVKGRFTISRDNSKNTVYLQMNSLRPEDTAVYYCAADTPPWGPLIYIESYDSWGQGTLVTVSSGGGGSGGGSEVQLVESGGGLVQPGNSLRLSCAASGFTFSSFGMSWVRQAPGKGLEWVSSISGSGSDTLYADSVKGRFTISRDNAKTTLYLQMNSLRPEDTAVYYCTIGGSLSRSSQGTLVTVSSGGGGSGGGSEVQLVESGGGLVQPGGSLRLSCAASGTLFKINAMGWYRQAPGKRRELVALITSSDTTDYADSVKGRFTISRDNSWNTVYLQMNSLRPEDTAVYYCHSDHYSLGVPEKRVILYGQGTLVTVSS

SEQ ID NO: 322 - protein, 373 aa, Artificial Sequence
  Nanobody sequence
EVQLVESGGGLVQPGGSLRLSCAASGTLFKINAMGWYRQAPGKRRELVALITSSDTTDYADSVKGRFTISRDNSWNTVYLQMNSLRPEDTAVYYCHSDHYSLGVPEKRVILYGQGTLVTVSSGGGGSGGGSEVQLVESGGGLVQPGNSLRLSCAASGFTFSSFGMSWVRQAPGKGLEWVSSISGSGSDTLYADSVKGRFTISRDNAKTTLYLQMNSLRPEDTAVYYCTIGGSLSRSSQGTLVTVSSGGGGSGGGSEVQLVESGGGLVQPGGSLRLSCAASGSIGGLNAMAWYRQAPGKERELVAGIFGVGSTRYADSVKGRFTISRDNSKNTVYLQMNSLRPEDTAVYYCRMSSVTRGSSDYWGQGTLVTVSS

SEQ ID NO: 323 - protein, 136 aa, Artificial Sequence
  Nanobody sequence
EVQLVESGGGLVQAGGSLRLSCAASGFTFSSYPMSWVRQAPGKGPAWVSTVSPGGITTSYADSVKGRFTISRDNAKNTLYLQMNSLKPEDTAVYYCLRDLNNRGQGTQVTVSSAAAEQKLISEEDLNGAAHHHHHH

SEQ ID NO: 324 - protein, 141 aa, Artificial Sequence
  Nanobody sequence
EVQLVESGGGLVQPGGSLRLSCAASGSIGGLNAMAWYRQAPGKERELVAGIFGVGSTRYADSVKGRFTISRDIAKNTVFLQMNSLNSEDTAVYYCRMSSVTRGSSDYWGQGTQVTVSSAAAEQKLISEEDLNGAAHHHHHH

SEQ ID NO: 325 - protein, 145 aa, Artificial Sequence
  Nanobody sequence
EVQLVESGGGLVQPGGSLRLSCAASGTLFKINAMGWYRQAPGKRRELVALITSSDTTDYAESVEGRFTISRDNTWNAVYLQMNSLKPEDTAVYYCHSDHYSMGVPEKRVIMYGQGTQVTVSSAAAEQKLISEEDLNGAAHHHHHH

SEQ ID NO: 326 - protein, 148 aa, Artificial Sequence
  Nanobody sequence
EVQLVESGGGLVQAGGSLRLSCAASGRTYYLNAMGWFRQGPGKDREFVAAIDWSDGNKDYADSVKGRFTISRDNAKNTVYLQMNSLKPEDTAVYYCAADTPPWGPMIYIESYDSWGQGTQVTVSSAAAEQKLISEEDLNGAAHHHHHH

SEQ ID NO: 327 - protein, 143 aa, Artificial Sequence
  Nanobody sequence
EVQLVESGGGLVQPGGSLGLSCVASGSIFRINAMAWYRQAPGKQRELVAEITAGGSTNYADSVKGRFTISVDNAWNTLYLQMNSLKVEDTAVYYCNLDHYTTWDRRSAYWGQGTQVTVSSAAAEQKLISEEDLNGAAHHHHHH

SEQ ID NO: 328 - DNA, 1482 bp, Artificial Sequence
  Nanobody sequence
atgagatttccttcaatttttactgctgttttattcgcagcatcctccgcattagctgctccagtcaacactacaacagaagatgaaacggcacaaattccggctgaagctgtcatcggttactcagatttagaaggggatttcgatgttgctgttttgccattttccaacagcacaaataacgggttattgtttataaatactactattgccagcattgctgctaaagaagaaggggtatctctcgagaaaagagaggtgcaattggtggagtctgggggaggattggtgcaggctgggggctctctgagactctcctgtgcagcctctggacgcacgtactatctcaatgccatgggctggttccgccagggtccagggaaggaccgtgagtttgtagcagctatagactggagtgatggtaacaaagactatgcagactccgtgaagggccgattcaccatctccagagacaacgccaagaacacggtgtatctgcaaatgaacagcctgaaacctgaggacacggccgtttattactgtgcagccgacacaccaccctgggggcctatgatctacatcgaatcgtatgactcctggggccaggggaccctggtcacggtctcctccggaggcggtgggtcaggtggcggaggcagcggtggaggaggtagtggcggtggcggtagtgggggtggaggcagcggaggcggaggcagtgggggcggtggatccgaggtgcagttggtggagtctgggggaggattggtgcaggctgggggctctctgagactctcctgtgcagcctctggacgcacgtactatctcaatgccatgggctggttccgccagggtccagggaaggaccgtgagtttgtagcagctatagactggagtgatggtaacaaagactatgcagactccgtgaagggccgattcaccatctccagagacaacgccaagaacacggtgtatctgcaaatgaacagcctgaaacctgaggacacggccgtttattactgtgcagccgacacaccaccctgggggcctatgatctacatcgaatcgtatgactcctggggccaggggaccctggtcacggtctcgagcggagggggaggtagtgggggtggctcagaggtacaactagtggagtctgggggtggcttggtgcaaccgggtaacagtctgcgccttagctgcgcagcgtctggctttaccttcagctcctttggcatgagctgggttcgccaggctccgggaaaaggactggaatgggtttcgtctattagcggcagtggtagcgatacgctctacgcggactccgtgaagggccgtttcaccatctcccgcgataacgccaaaactacactgtatctgcaaatgaatagcctgcgtcctgaagacacggccgtttattactgtactattggtggctcgttaagccgttcttcacagggtaccctggtcaccgtctcctca

SEQ ID NO: 329 - DNA, 1467 bp, Artificial Sequence
  Nanobody sequence
atgagatttccttcaatttttactgctgttttattcgcagcatcctccgcattagctgctccagtcaacactacaacagaagatgaaacggcacaaattccggctgaagctgtcatcggttactcagatttagaaggggatttcgatgttgctgttttgccattttccaacagcacaaataacgggttattgtttataaatactactattgccagcattgctgctaaagaagaaggggtatctctcgagaaaagagaggtgcaattggtggagtctgggggaggattggtgcaggctgggggctctctgagactctcctgtgcagcctctggacgcacgtactatctcaatgccatgggctggttccgccagggtccagggaaggaccgtgagtttgtagcagctatagactggagtgatggtaacaaagactatgcagactccgtgaagggccgattcaccatctccagagacaacgccaagaacacggtgtatctgcaaatgaacagcctgaaacctgaggacacggccgtttattactgtgcagccgacacaccaccctgggggcctatgatctacatcgaatcgtatgactcctggggccaggggaccctggtcacggtctcctccggaggcggtgggtcaggtggcggaggcagcggtggaggaggtagtggcggtggcggtagtgggggtggaggcagcggaggcggaggcagtgggggcggtggatccgaggtgcagttggtggagtctgggggaggcttggtgcagcctggggggtctctgggactctcctgtgtagcctctggaagcatcttcagaatcaatgccatggcctggtaccgccaggctccagggaagcagcgcgagttggtcgcggaaattactgctggtggtagcacaaactatgcagactccgtgaagggccgattcaccatctccgtagacaacgcctggaacacgctgtatctgcaaatgaacagcctgaaagttgaggacacggccgtctattactgtaatctagatcattatacgacatgggatagacggagtgcctactggggccaggggaccctggtcacggtctcgagcggagggggaggtagtgggggtggctcagaggtacaactagtggagtctgggggtggcttggtgcaaccgggtaacagtctgcgccttagctgcgcagcgtctggctttaccttcagctcctttggcatgagctgggttcgccaggctccgggaaaaggactggaatgggtttcgtctattagcggcagtggtagcgatacgctctacgcggactccgtgaagggccgtttcaccatctcccgcgataacgccaaaactacactgtatctgcaaatgaatagcctgcgtcctgaagacacggccgtttattactgtactattggtggctcgttaagccgttcttcacagggtaccctggtcaccgtctcctca

SEQ ID NO: 330 - DNA, 1446 bp, Artificial Sequence
  Nanobody sequence
atgagatttccttcaatttttactgctgttttattcgcagcatcctccgcattagctgctccagtcaacactacaacagaagatgaaacggcacaaattccggctgaagctgtcatcggttactcagatttagaaggggatttcgatgttgctgttttgccattttccaacagcacaaataacgggttattgtttataaatactactattgccagcattgctgctaaagaagaaggggtatctctcgagaaaagagaggtgcaattggtggagtctgggggaggattggtgcaggctgggggctctctgagactctcctgtgcagcctctggacgcacgtactatctcaatgccatgggctggttccgccagggtccagggaaggaccgtgagtttgtagcagctatagactggagtgatggtaacaaagactatgcagactccgtgaagggccgattcaccatctccagagacaacgccaagaacacggtgtatctgcaaatgaacagcctgaaacctgaggacacggccgtttattactgtgcagccgacacaccaccctgggggcctatgatctacatcgaatcgtatgactcctggggccaggggaccctggtcacggtctcctccggaggcggtgggtcaggtggcggaggcagcggtggaggaggtagtggcggtggcggtagtgggggtggaggcagcggaggcggaggcagtgggggcggtggatccgaggtgcagttggtggagtctgggggaggcttggtgcaggctggggggtctctgagactctcctgtgcagcctctggattcaccttcagtagctatcccatgagctgggtccgccaggctccaggaaaggggcccgcgtgggtctcaactgttagtcctggtggtataaccacaagctatgcagactccgtgaagggccgattcaccatctccagagacaacgccaagaacacgctgtatttgcaaatgaacagcctgaaacctgaggacacggccgtgtattactgcttaagagatctgaataataggggccaggggaccctggtcacggtctcgagcggagggggaggtagtgggggtggctcagaggtacaactagtggagtctgggggtggcttggtgcaaccgggtaacagtctgcgccttagctgcgcagcgtctggctttaccttcagctcctttggcatgagctgggttcgccaggctccgggaaaaggactggaatgggtttcgtctattagcggcagtggtagcgatacgctctacgcggactccgtgaagggccgtttcaccatctcccgcgataacgccaaaactacactgtatctgcaaatgaatagcctgcgtcctgaagacacggccgtttattactgtactattggtggctcgttaagccgttcttcacagggtaccctggtcaccgtctcctca

SEQ ID NO: 331 - DNA, 1467 bp, Artificial Sequence
  Nanobody sequence
atgagatttccttcaatttttactgctgttttattcgcagcatcctccgcattagctgctccagtcaacactacaacagaagatgaaacggcacaaattccggctgaagctgtcatcggttactcagatttagaaggggatttcgatgttgctgttttgccattttccaacagcacaaataacgggttattgtttataaatactactattgccagcattgctgctaaagaagaaggggtatctctcgagaaaagagaggtgcaattggtggagtctgggggaggcttggtgcagcctggggggtctctgggactctcctgtgtagcctctggaagcatcttcagaatcaatgccatggcctggtaccgccaggctccagggaagcagcgcgagttggtcgcggaaattactgctggtggtagcacaaactatgcagactccgtgaagggccgattcaccatctccgtagacaacgcctggaacacgctgtatctgcaaatgaacagcctgaaagttgaggacacggccgtctattactgtaatctagatcattatacgacatgggatagacggagtgcctactggggccaggggaccctggtcacggtctcctccggaggcggtgggtcaggtggcggaggcagcggtggaggaggtagtggcggtggcggtagtgggggtggaggcagcggaggcggaggcagtgggggcggtggatccgaggtgcagttggtggagtctgggggaggattggtgcaggctgggggctctctgagactctcctgtgcagcctctggacgcacgtactatctcaatgccatgggctggttccgccagggtccagggaaggaccgtgagtttgtagcagctatagactggagtgatggtaacaaagactatgcagactccgtgaagggccgattcaccatctccagagacaacgccaagaacacggtgtatctgcaaatgaacagcctgaaacctgaggacacggccgtttattactgtgcagccgacacaccaccctgggggcctatgatctacatcgaatcgtatgactcctggggccaggggaccctggtcacggtctcgagcggagggggaggtagtgggggtggctcagaggtacaactagtggagtctgggggtggcttggtgcaaccgggtaacagtctgcgccttagctgcgcagcgtctggctttaccttcagctcctttggcatgagctgggttcgccaggctccgggaaaaggactggaatgggtttcgtctattagcggcagtggtagcgatacgctctacgcggactccgtgaagggccgtttcaccatctcccgcgataacgccaaaactacactgtatctgcaaatgaatagcctgcgtcctgaagacacggccgtttattactgtactattggtggctcgttaagccgttcttcacagggtaccctggtcaccgtctcctca

SEQ ID NO: 332 - DNA, 1431 bp, Artificial Sequence
  Nanobody sequence
atgagatttccttcaatttttactgctgttttattcgcagcatcctccgcattagctgctccagtcaacactacaacagaagatgaaacggcacaaattccggctgaagctgtcatcggttactcagatttagaaggggatttcgatgttgctgttttgccattttccaacagcacaaataacgggttattgtttataaatactactattgccagcattgctgctaaagaagaaggggtatctctcgagaaaagagaggtgcaattggtggagtctgggggaggcttggtgcagcctggggggtctctgggactctcctgtgtagcctctggaagcatcttcagaatcaatgccatggcctggtaccgccaggctccagggaagcagcgcgagttggtcgcggaaattactgctggtggtagcacaaactatgcagactccgtgaagggccgattcaccatctccgtagacaacgcctggaacacgctgtatctgcaaatgaacagcctgaaagttgaggacacggccgtctattactgtaatctagatcattatacgacatgggatagacggagtgcctactggggccaggggaccctggtcacggtctcctccggaggcggtgggtcaggtggcggaggcagcggtggaggaggtagtggcggtggcggtagtgggggtggaggcagcggaggcggaggcagtgggggcggtggatccgaggtgcagttggtggagtctgggggaggcttggtgcaggctggggggtctctgagactctcctgtgcagcctctggattcaccttcagtagctatcccatgagctgggtccgccaggctccaggaaaggggcccgcgtgggtctcaactgttagtcctggtggtataaccacaagctatgcagactccgtgaagggccgattcaccatctccagagacaacgccaagaacacgctgtatttgcaaatgaacagcctgaaacctgaggacacggccgtgtattactgcttaagagatctgaataataggggccaggggaccctggtcacggtctcgagcggagggggaggtagtgggggtggctcagaggtacaactagtggagtctgggggtggcttggtgcaaccgggtaacagtctgcgccttagctgcgcagcgtctggctttaccttcagctcctttggcatgagctgggttcgccaggctccgggaaaaggactggaatgggtttcgtctattagcggcagtggtagcgatacgctctacgcggactccgtgaagggccgtttcaccatctcccgcgataacgccaaaactacactgtatctgcaaatgaatagcctgcgtcctgaagacacggccgtttattactgtactattggtggctcgttaagccgttcttcacagggtaccctggtcaccgtctcctca

SEQ ID NO: 333 - DNA, 1446 bp, Artificial Sequence
  Nanobody sequence
atgagatttccttcaatttttactgctgttttattcgcagcatcctccgcattagctgctccagtcaacactacaacagaagatgaaacggcacaaattccggctgaagctgtcatcggttactcagatttagaaggggatttcgatgttgctgttttgccattttccaacagcacaaataacgggttattgtttataaatactactattgccagcattgctgctaaagaagaaggggtatctctcgagaaaagagaggtgcaattggtggagtctgggggaggcttggtgcaggctggggggtctctgagactctcctgtgcagcctctggattcaccttcagtagctatcccatgagctgggtccgccaggctccaggaaaggggcccgcgtgggtctcaactgttagtcctggtggtataaccacaagctatgcagactccgtgaagggccgattcaccatctccagagacaacgccaagaacacgctgtatttgcaaatgaacagcctgaaacctgaggacacggccgtgtattactgcttaagagatctgaataataggggccaggggaccctggtcacggtctcctccggaggcggtgggtcaggtggcggaggcagcggtggaggaggtagtggcggtggcggtagtgggggtggaggcagcggaggcggaggcagtgggggcggtggatccgaggtgcagttggtggagtctgggggaggattggtgcaggctgggggctctctgagactctcctgtgcagcctctggacgcacgtactatctcaatgccatgggctggttccgccagggtccagggaaggaccgtgagtttgtagcagctatagactggagtgatggtaacaaagactatgcagactccgtgaagggccgattcaccatctccagagacaacgccaagaacacggtgtatctgcaaatgaacagcctgaaacctgaggacacggccgtttattactgtgcagccgacacaccaccctgggggcctatgatctacatcgaatcgtatgactcctggggccaggggaccctggtcacggtctcgagcggagggggaggtagtgggggtggctcagaggtacaactagtggagtctgggggtggcttggtgcaaccgggtaacagtctgcgccttagctgcgcagcgtctggctttaccttcagctcctttggcatgagctgggttcgccaggctccgggaaaaggactggaatgggtttcgtctattagcggcagtggtagcgatacgctctacgcggactccgtgaagggccgtttcaccatctcccgcgataacgccaaaactacactgtatctgcaaatgaatagcctgcgtcctgaagacacggccgtttattactgtactattggtggctcgttaagccgttcttcacagggtaccctggtcaccgtctcctca

SEQ ID NO: 334 - DNA, 1431 bp, Artificial Sequence
  Nanobody sequence
atgagatttccttcaatttttactgctgttttattcgcagcatcctccgcattagctgctccagtcaacactacaacagaagatgaaacggcacaaattccggctgaagctgtcatcggttactcagatttagaaggggatttcgatgttgctgttttgccattttccaacagcacaaataacgggttattgtttataaatactactattgccagcattgctgctaaagaagaaggggtatctctcgagaaaagagaggtgcaattggtggagtctgggggaggcttggtgcaggctggggggtctctgagactctcctgtgcagcctctggattcaccttcagtagctatcccatgagctgggtccgccaggctccaggaaaggggcccgcgtgggtctcaactgttagtcctggtggtataaccacaagctatgcagactccgtgaagggccgattcaccatctccagagacaacgccaagaacacgctgtatttgcaaatgaacagcctgaaacctgaggacacggccgtgtattactgcttaagagatctgaataataggggccaggggaccctggtcacggtctcctccggaggcggtgggtcaggtggcggaggcagcggtggaggaggtagtggcggtggcggtagtgggggtggaggcagcggaggcggaggcagtgggggcggtggatccgaggtgcagttggtggagtctgggggaggcttggtgcagcctggggggtctctgggactctcctgtgtagcctctggaagcatcttcagaatcaatgccatggcctggtaccgccaggctccagggaagcagcgcgagttggtcgcggaaattactgctggtggtagcacaaactatgcagactccgtgaagggccgattcaccatctccgtagacaacgcctggaacacgctgtatctgcaaatgaacagcctgaaagttgaggacacggccgtctattactgtaatctagatcattatacgacatgggatagacggagtgcctactggggccaggggaccctggtcacggtctcgagcggagggggaggtagtgggggtggctcagaggtacaactagtggagtctgggggtggcttggtgcaaccgggtaacagtctgcgccttagctgcgcagcgtctggctttaccttcagctcctttggcatgagctgggttcgccaggctccgggaaaaggactggaatgggtttcgtctattagcggcagtggtagcgatacgctctacgcggactccgtgaagggccgtttcaccatctcccgcgataacgccaaaactacactgtatctgcaaatgaatagcctgcgtcctgaagacacggccgtttattactgtactattggtggctcgttaagccgttcttcacagggtaccctggtcaccgtctcctca

SEQ ID NO: 335 - DNA, 1410 bp, Artificial Sequence
  Nanobody sequence
atgagatttccttcaatttttactgctgttttattcgcagcatcctccgcattagctgctccagtcaacactacaacagaagatgaaacggcacaaattccggctgaagctgtcatcggttactcagatttagaaggggatttcgatgttgctgttttgccattttccaacagcacaaataacgggttattgtttataaatactactattgccagcattgctgctaaagaagaaggggtatctctcgagaaaagagaggtgcaattggtggagtctgggggaggcttggtgcaggctggggggtctctgagactctcctgtgcagcctctggattcaccttcagtagctatcccatgagctgggtccgccaggctccaggaaaggggcccgcgtgggtctcaactgttagtcctggtggtataaccacaagctatgcagactccgtgaagggccgattcaccatctccagagacaacgccaagaacacgctgtatttgcaaatgaacagcctgaaacctgaggacacggccgtgtattactgcttaagagatctgaataataggggccaggggaccctggtcacggtctcctccggaggcggtgggtcaggtggcggaggcagcggtggaggaggtagtggcggtggcggtagtgggggtggaggcagcggaggcggaggcagtgggggcggtggatccgaggtgcagttggtggagtctgggggaggcttggtgcaggctggggggtctctgagactctcctgtgcagcctctggattcaccttcagtagctatcccatgagctgggtccgccaggctccaggaaaggggcccgcgtgggtctcaactgttagtcctggtggtataaccacaagctatgcagactccgtgaagggccgattcaccatctccagagacaacgccaagaacacgctgtatttgcaaatgaacagcctgaaacctgaggacacggccgtgtattactgcttaagagatctgaataataggggccaggggaccctggtcacggtctcgagcggagggggaggtagtgggggtggctcagaggtacaactagtggagtctgggggtggcttggtgcaaccgggtaacagtctgcgccttagctgcgcagcgtctggctttaccttcagctcctttggcatgagctgggttcgccaggctccgggaaaaggactggaatgggtttcgtctattagcggcagtggtagcgatacgctctacgcggactccgtgaagggccgtttcaccatctcccgcgataacgccaaaactacactgtatctgcaaatgaatagcctgcgtcctgaagacacggccgtttattactgtactattggtggctcgttaagccgttcttcacagggtaccctggtcaccgtctcctca

SEQ ID NO: 336 - DNA, 1473 bp, Artificial Sequence
  Nanobody sequence
atgagatttccttcaatttttactgctgttttattcgcagcatcctccgcattagctgctccagtcaacactacaacagaagatgaaacggcacaaattccggctgaagctgtcatcggttactcagatttagaaggggatttcgatgttgctgttttgccattttccaacagcacaaataacgggttattgtttataaatactactattgccagcattgctgctaaagaagaaggggtatctctcgagaaaagagaggtgcaattggtggagtctgggggaggattggtgcaggctgggggctctctgagactctcctgtgcagcctctggacgcacgtactatctcaatgccatgggctggttccgccagggtccagggaaggaccgtgagtttgtagcagctatagactggagtgatggtaacaaagactatgcagactccgtgaagggccgattcaccatctccagagacaacgccaagaacacggtgtatctgcaaatgaacagcctgaaacctgaggacacggccgtttattactgtgcagccgacacaccaccctgggggcctatgatctacatcgaatcgtatgactcctggggccaggggaccctggtcacggtctcctccggaggcggtgggtcaggtggcggaggcagcggtggaggaggtagtggcggtggcggtagtgggggtggaggcagcggaggcggaggcagtgggggcggtggatccgaggtgcagttggtggagtctgggggaggcttggtgcagcctggggggtctctgagactctcctgtgcagcctctggaacgctcttcaaaatcaacgccatgggctggtaccgccaggctccagggaagcggcgcgagttggtcgcacttattactagtagcgatacaacggattatgcagagtccgtggagggccgattcaccatctccagagacaacacgtggaacgcggtgtatctgcaaatgaacagtctgaaacctgaggatacggccgtctattactgtcactcagatcattactcgatgggtgtgcctgaaaagcgagtcataatgtacggccaggggaccctggtcacggtctcgagcggagggggaggtagtgggggtggctcagaggtacaactagtggagtctgggggtggcttggtgcaaccgggtaacagtctgcgccttagctgcgcagcgtctggctttaccttcagctcctttggcatgagctgggttcgccaggctccgggaaaaggactggaatgggtttcgtctattagcggcagtggtagcgatacgctctacgcggactccgtgaagggccgtttcaccatctcccgcgataacgccaaaactacactgtatctgcaaatgaatagcctgcgtcctgaagacacggccgtttattactgtactattggtggctcgttaagccgttcttcacagggtaccctggtcaccgtctcctca

SEQ ID NO: 337 - DNA, 1437 bp, Artificial Sequence
  Nanobody sequence
atgagatttccttcaatttttactgctgttttattcgcagcatcctccgcattagctgctccagtcaacactacaacagaagatgaaacggcacaaattccggctgaagctgtcatcggttactcagatttagaaggggatttcgatgttgctgttttgccattttccaacagcacaaataacgggttattgtttataaatactactattgccagcattgctgctaaagaagaaggggtatctctcgagaaaagagaggtgcaattggtggagtctgggggaggcttggtgcaggctggggggtctctgagactctcctgtgcagcctctggattcaccttcagtagctatcccatgagctgggtccgccaggctccaggaaaggggcccgcgtgggtctcaactgttagtcctggtggtataaccacaagctatgcagactccgtgaagggccgattcaccatctccagagacaacgccaagaacacgctgtatttgcaaatgaacagcctgaaacctgaggacacggccgtgtattactgcttaagagatctgaataataggggccaggggaccctggtcacggtctcctccggaggcggtgggtcaggtggcggaggcagcggtggaggaggtagtggcggtggcggtagtgggggtggaggcagcggaggcggaggcagtgggggcggtggatccgaggtgcagttggtggagtctgggggaggcttggtgcagcctggggggtctctgagactctcctgtgcagcctctggaacgctcttcaaaatcaacgccatgggctggtaccgccaggctccagggaagcggcgcgagttggtcgcacttattactagtagcgatacaacggattatgcagagtccgtggagggccgattcaccatctccagagacaacacgtggaacgcggtgtatctgcaaatgaacagtctgaaacctgaggatacggccgtctattactgtcactcagatcattactcgatgggtgtgcctgaaaagcgagtcataatgtacggccaggggaccctggtcacggtctcgagcggagggggaggtagtgggggtggctcagaggtacaactagtggagtctgggggtggcttggtgcaaccgggtaacagtctgcgccttagctgcgcagcgtctggctttaccttcagctcctttggcatgagctgggttcgccaggctccgggaaaaggactggaatgggtttcgtctattagcggcagtggtagcgatacgctctacgcggactccgtgaagggccgtttcaccatctcccgcgataacgccaaaactacactgtatctgcaaatgaatagcctgcgtcctgaagacacggccgtttattactgtactattggtggctcgttaagccgttcttcacagggtaccctggtcaccgtctcctca

SEQ ID NO: 338 - DNA, 1464 bp, Artificial Sequence
  Nanobody sequence
atgagatttccttcaatttttactgctgttttattcgcagcatcctccgcattagctgctccagtcaacactacaacagaagatgaaacggcacaaattccggctgaagctgtcatcggttactcagatttagaaggggatttcgatgttgctgttttgccattttccaacagcacaaataacgggttattgtttataaatactactattgccagcattgctgctaaagaagaaggggtatctctcgagaaaagagaggtgcaattggtggagtctgggggaggcttggtgcagcctggggggtctctgagactctcctgtgcagcctctggaacgctcttcaaaatcaacgccatgggctggtaccgccaggctccagggaagcggcgcgagttggtcgcacttattactagtagcgatacaacggattatgcagagtccgtggagggccgattcaccatctccagagacaacacgtggaacgcggtgtatctgcaaatgaacagtctgaaacctgaggatacggccgtctattactgtcactcagatcattactcgatgggtgtgcctgaaaagcgagtcataatgtacggccaggggaccctggtcacggtctcctccggaggcggtgggtcaggtggcggaggcagcggtggaggaggtagtggcggtggcggtagtgggggtggaggcagcggaggcggaggcagtgggggcggtggatccgaggtgcagttggtggagtctgggggaggcttggtgcagcctggggggtctctgagactctcctgtgcagcctctggaacgctcttcaaaatcaacgccatgggctggtaccgccaggctccagggaagcggcgcgagttggtcgcacttattactagtagcgatacaacggattatgcagagtccgtggagggccgattcaccatctccagagacaacacgtggaacgcggtgtatctgcaaatgaacagtctgaaacctgaggatacggccgtctattactgtcactcagatcattactcgatgggtgtgcctgaaaagcgagtcataatgtacggccaggggaccctggtcacggtctcgagcggagggggaggtagtgggggtggctcagaggtacaactagtggagtctgggggtggcttggtgcaaccgggtaacagtctgcgccttagctgcgcagcgtctggctttaccttcagctcctttggcatgagctgggttcgccaggctccgggaaaaggactggaatgggtttcgtctattagcggcagtggtagcgatacgctctacgcggactccgtgaagggccgtttcaccatctcccgcgataacgccaaaactacactgtatctgcaaatgaatagcctgcgtcctgaagacacggccgtttattactgtactattggtggctcgttaagccgttcttcacagggtaccctggtcaccgtctcctca

SEQ ID NO: 339 - DNA, 1473 bp, Artificial Sequence
  Nanobody sequence
atgagatttccttcaatttttactgctgttttattcgcagcatcctccgcattagctgctccagtcaacactacaacagaagatgaaacggcacaaattccggctgaagctgtcatcggttactcagatttagaaggggatttcgatgttgctgttttgccattttccaacagcacaaataacgggttattgtttataaatactactattgccagcattgctgctaaagaagaaggggtatctctcgagaaaagagaggtgcaattggtggagtctgggggaggcttggtgcagcctggggggtctctgagactctcctgtgcagcctctggaacgctcttcaaaatcaacgccatgggctggtaccgccaggctccagggaagcggcgcgagttggtcgcacttattactagtagcgatacaacggattatgcagagtccgtggagggccgattcaccatctccagagacaacacgtggaacgcggtgtatctgcaaatgaacagtctgaaacctgaggatacggccgtctattactgtcactcagatcattactcgatgggtgtgcctgaaaagcgagtcataatgtacggccaggggaccctggtcacggtctcctccggaggcggtgggtcaggtggcggaggcagcggtggaggaggtagtggcggtggcggtagtgggggtggaggcagcggaggcggaggcagtgggggcggtggatccgaggtgcagttggtggagtctgggggaggattggtgcaggctgggggctctctgagactctcctgtgcagcctctggacgcacgtactatctcaatgccatgggctggttccgccagggtccagggaaggaccgtgagtttgtagcagctatagactggagtgatggtaacaaagactatgcagactccgtgaagggccgattcaccatctccagagacaacgccaagaacacggtgtatctgcaaatgaacagcctgaaacctgaggacacggccgtttattactgtgcagccgacacaccaccctgggggcctatgatctacatcgaatcgtatgactcctggggccaggggaccctggtcacggtctcgagcggagggggaggtagtgggggtggctcagaggtacaactagtggagtctgggggtggcttggtgcaaccgggtaacagtctgcgccttagctgcgcagcgtctggctttaccttcagctcctttggcatgagctgggttcgccaggctccgggaaaaggactggaatgggtttcgtctattagcggcagtggtagcgatacgctctacgcggactccgtgaagggccgtttcaccatctcccgcgataacgccaaaactacactgtatctgcaaatgaatagcctgcgtcctgaagacacggccgtttattactgtactattggtggctcgttaagccgttcttcacagggtaccctggtcaccgtctcctca

SEQ ID NO: 340 - DNA, 1437 bp, Artificial Sequence
  Nanobody sequence
atgagatttccttcaatttttactgctgttttattcgcagcatcctccgcattagctgctccagtcaacactacaacagaagatgaaacggcacaaattccggctgaagctgtcatcggttactcagatttagaaggggatttcgatgttgctgttttgccattttccaacagcacaaataacgggttattgtttataaatactactattgccagcattgctgctaaagaagaaggggtatctctcgagaaaagagaggtgcaattggtggagtctgggggaggcttggtgcagcctggggggtctctgagactctcctgtgcagcctctggaacgctcttcaaaatcaacgccatgggctggtaccgccaggctccagggaagcggcgcgagttggtcgcacttattactagtagcgatacaacggattatgcagagtccgtggagggccgattcaccatctccagagacaacacgtggaacgcggtgtatctgcaaatgaacagtctgaaacctgaggatacggccgtctattactgtcactcagatcattactcgatgggtgtgcctgaaaagcgagtcataatgtacggccaggggaccctggtcacggtctcctccggaggcggtgggtcaggtggcggaggcagcggtggaggaggtagtggcggtggcggtagtgggggtggaggcagcggaggcggaggcagtgggggcggtggatccgaggtgcagttggtggagtctgggggaggcttggtgcaggctggggggtctctgagactctcctgtgcagcctctggattcaccttcagtagctatcccatgagctgggtccgccaggctccaggaaaggggcccgcgtgggtctcaactgttagtcctggtggtataaccacaagctatgcagactccgtgaagggccgattcaccatctccagagacaacgccaagaacacgctgtatttgcaaatgaacagcctgaaacctgaggacacggccgtgtattactgcttaagagatctgaataataggggccaggggaccctggtcacggtctcgagcggagggggaggtagtgggggtggctcagaggtacaactagtggagtctgggggtggcttggtgcaaccgggtaacagtctgcgccttagctgcgcagcgtctggctttaccttcagctcctttggcatgagctgggttcgccaggctccgggaaaaggactggaatgggtttcgtctattagcggcagtggtagcgatacgctctacgcggactccgtgaagggccgtttcaccatctcccgcgataacgccaaaactacactgtatctgcaaatgaatagcctgcgtcctgaagacacggccgtttattactgtactattggtggctcgttaagccgttcttcacagggtaccctggtcaccgtctcctca

SEQ ID NO: 341 - DNA, 471 bp, Artificial Sequence
  Nanobody sequence
atgaaaaagaccgctatcgcgattgcagtggcactggctggtttggccaccgtggcccaggccgaggtgcaattggtggagtctgggggtggtctggttcagcctggtggtagtctgcgtctgagctgtgcagcaagcggttttacctttagcagctatccgatgagctgggttcgtcaggcaccgggtaaaggtccggcatgggttagcaccgttagtccgggaggtattaccaccagttatgcagatagcgttaaaggtcgttttaccattagccgtgacaatagcaaaaacaccctgtatctgcagatgaatagcctgcgtcctgaagataccgcagtttattattgtctgcgcgatctgaataatcgtggtcaggggaccctggtcaccgtctcctcagcggccgcagaacaaaaactcatctcagaagaggatctgaatggggccgcacatcatcatcatcatcat

SEQ ID NO: 342 - DNA, 471 bp, Artificial Sequence
  Nanobody sequence
atgaaaaagaccgctatcgcgattgcagtggcactggctggtttggccaccgtggcccaggccgaggtgcaattggtggagtctgggggtggtctggttcagcctggtggtagcctgcgtctgagctgtgcagcaagcggttttacctttagcagctatccgatgagctgggttcgtcaggcaccgggtaaaggtcctgaatgggttagcaccgttagtccgggaggtattaccaccagttatgcagatagcgttaaaggtcgttttaccattagccgtgacaatagcaaaaacaccctgtatctgcagatgaatagtctgcgtcctgaagataccgcagtttattattgtctgcgcgatctgaataatcgtggtcaggggaccctggtcaccgtctcctcagcggccgcagaacaaaaactcatctcagaagaggatctgaatggggccgcacatcatcatcatcatcat

SEQ ID NO: 343 - DNA, 471 bp, Artificial Sequence
  Nanobody sequence
atgaaaaagaccgctatcgcgattgcagtggcactggctggtttggccaccgtggcccaggccgaggtgcaattggtggagtctgggggtggtctggttcagcctggtggtagtctgcgtctgagctgtgcagcaagcggttttacctttagcagctatccgatgagctgggttcgtcaggcaccgggtaaaggtccggcatgggttagcaccgttagtccgggaggtattaccaccagttatgcagatagcgttaaaggtcgttttaccattagccgtgacaatagcaaaaacaccctgtatctgcagatgaatagcctgcgtcctgaagataccgcagtttattattgtgcacgcgatctgaataatcgtggtcaggggaccctggtcaccgtctcctcagcggccgcagaacaaaaactcatctcagaagaggatctgaatggggccgcacatcatcatcatcatcat

SEQ ID NO: 344 - DNA, 471 bp, Artificial Sequence
  Nanobody sequence
atgaaaaagaccgctatcgcgattgcagtggcactggctggtttggccaccgtggcccaggccgaggtgcaattggtggagtctgggggtggtctggttcagcctggtggtagtctgcgtctgagctgtgcagcaagcggttttacctttagcagctatccgatgagctgggttcgtcaggcaccgggtaaaggtcctgaatgggttagcaccgttagtccgggaggtattaccaccagttatgcagatagcgttaaaggtcgttttaccattagccgtgacaatagcaaaaacaccctgtatctgcagatgaatagcctgcgtcctgaagataccgcagtttattattgtgcacgcgatctgaataatcgtggtcaggggaccctggtcaccgtctcctcagcggccgcagaacaaaaactcatctcagaagaggatctgaatggggccgcacatcatcatcatcatcat

SEQ ID NO: 345 - DNA, 507 bp, Artificial Sequence
  Nanobody sequence
atgaaaaagaccgctatcgcgattgcagtggcactggctggtttggccaccgtggcccaggccgaggtgcaattggtggagtctgggggtggtctggttcagcctggtggtagcctgcgtctgagctgtgcagcaagcggtcgtacctattatctgaatgcaatgggttggtttcgtcagggtccgggtaaagatcgtgaatttgttgcagccattgattggagtgatggcaataaagattatgccgatagcgtgaaaggtcgttttaccattagccgtgataacagcaaaaacaccgtttatctgcagatgaatagcctgcgtcctgaagataccgcagtttattattgtgcagcagatacccctccgtggggtccgatgatttatattgaaagctatgatagctggggtcaggggaccctggtcaccgtctcctcagcggccgcagaacaaaaactcatctcagaagaggatctgaatggggccgcacatcatcatcatcatcat

SEQ ID NO: 346 - DNA, 507 bp, Artificial Sequence
  Nanobody sequence
atgaaaaagaccgctatcgcgattgcagtggcactggctggtttggccaccgtggcccaggccgaggtgcaattggtggagtctgggggtggtctggttcagcctggtggtagcctgcgtctgagctgtgcagcaagcggtcgtacctattatctgaatgcaatgggttggtttcgtcaggcaccgggtaaagatcgtgaatttgttgcagccattgattggagtgatggcaataaagattatgccgatagcgtgaaaggtcgttttaccattagccgtgataacagcaaaaacaccgtttatctgcagatgaatagcctgcgtcctgaagataccgcagtttattattgtgcagcagatacccctccgtggggtccgatgatttatattgaaagctatgatagctggggtcaggggaccctggtcaccgtctcctcagcggccgcagaacaaaaactcatctcagaagaggatctgaatggggccgcacatcatcatcatcatcat

SEQ ID NO: 347 - DNA, 507 bp, Artificial Sequence
  Nanobody sequence
atgaaaaagaccgctatcgcgattgcagtggcactggctggtttggccaccgtggcccaggccgaggtgcaattggtggagtctgggggtggtctggttcagcctggtggtagcctgcgtctgagctgtgcagcaagcggtcgtacctattatctgaatgcaatgggttggtttcgtcagggtccgggtaaagaacgtgaatttgttgcagccattgattggagtgatggcaataaagattatgccgatagcgtgaaaggtcgttttaccattagccgtgataacagcaaaaacaccgtttatctgcagatgaatagcctgcgtcctgaagataccgcagtttattattgtgcagcagatacccctccgtggggtccgatgatttatattgaaagctatgatagctggggtcaggggaccctggtcaccgtctcctcagcggccgcagaacaaaaactcatctcagaagaggatctgaatggggccgcacatcatcatcatcatcat

SEQ ID NO: 348 - DNA, 507 bp, Artificial Sequence
  Nanobody sequence
atgaaaaagaccgctatcgcgattgcagtggcactggctggtttggccaccgtggcccaggccgaggtgcaattggtggagtctgggggtggtctggttcagcctggtggtagcctgcgtctgagctgtgcagcaagcggtcgtacctattatctgaatgcaatgggttggtttcgtcaggcaccgggtaaagaacgtgaatttgttgcagccattgattggagtgatggcaataaagattatgccgatagcgtgaaaggtcgttttaccattagccgtgataacagcaaaaacaccgtttatctgcagatgaatagcctgcgtcctgaagataccgcagtttattattgtgcagcagatacccctccgtggggtccgatgatttatattgaaagctatgatagctggggtcaggggaccctggtcaccgtctcctcagcggccgcagaacaaaaactcatctcagaagaggatctgaatggggccgcacatcatcatcatcatcat

SEQ ID NO: 349 - DNA, 1446 bp, Artificial Sequence
  Nanobody sequence
atgagatttccttcaatttttactgctgttttattcgcagcatcctccgcattagctgctccagtcaacactacaacagaagatgaaacggcacaaattccggctgaagctgtcatcggttactcagatttagaaggggatttcgatgttgctgttttgccattttccaacagcacaaataacgggttattgtttataaatactactattgccagcattgctgctaaagaagaaggggtatctctcgagaaaagagaggtgcaattggtggagtctgggggaggcttggtgcagcctggggggtctctgggactctcctgtgtagcctctggaagcatcttcagaatcaatgccatggcctggtaccgccaggctccagggaagcagcgcgagttggtcgcggaaattactgctggtggtagcacaaactatgcagactccgtgaagggccgattcaccatctccgtagacaacgcctggaacacgctgtatctgcaaatgaacagcctgaaagttgaggacacggccgtctattactgtaatctagatcattatacgacatgggatagacggagtgcctactggggccaggggaccctggtcacggtctcctccggaggcggtgggtcaggtggcggaggcagcggtggaggaggtagtggcggtggcggtagtgggggtggaggcagcggaggcggaggcagtgggggcggtggatccgaggtgcagttggtggagtctgggggaggcttggtgcaacctggggggtctctgagactctcctgcgcagcctctggaagcatcggcggtctcaatgccatggcctggtaccgccaggctccaggaaaagagcgcgagttggtcgcaggtatttttggcgttggtagcacgaggtacgcggactccgtgaagggccgattcaccatctctagagacatcgccaagaacacggtgtttctgcaaatgaacagcctgaattctgaggacacggccgtttattactgtcggatgtcaagtgttactcgtggtagttctgactactggggtcaggggaccctggtcacggtctcgagcggagggggaggtagtgggggtggctcagaggtacaactagtggagtctgggggtggcttggtgcaaccgggtaacagtctgcgccttagctgcgcagcgtctggctttaccttcagctcctttggcatgagctgggttcgccaggctccgggaaaaggactggaatgggtttcgtctattagcggcagtggtagcgatacgctctacgcggactccgtgaagggccgtttcaccatctcccgcgataacgccaaaactacactgtatctgcaaatgaatagcctgcgtcctgaagacacggccgtttattactgtactattggtggctcgttaagccgttcttcacagggtaccctggtcaccgtctcctca

SEQ ID NO: 350 - DNA, 1452 bp, Artificial Sequence
  Nanobody sequence
atgagatttccttcaatttttactgctgttttattcgcagcatcctccgcattagctgctccagtcaacactacaacagaagatgaaacggcacaaattccggctgaagctgtcatcggttactcagatttagaaggggatttcgatgttgctgttttgccattttccaacagcacaaataacgggttattgtttataaatactactattgccagcattgctgctaaagaagaaggggtatctctcgagaaaagagaggtgcaattggtggagtctgggggaggcttggtgcagcctggggggtctctgagactctcctgtgcagcctctggaacgctcttcaaaatcaacgccatgggctggtaccgccaggctccagggaagcggcgcgagttggtcgcacttattactagtagcgatacaacggattatgcagagtccgtggagggccgattcaccatctccagagacaacacgtggaacgcggtgtatctgcaaatgaacagtctgaaacctgaggatacggccgtctattactgtcactcagatcattactcgatgggtgtgcctgaaaagcgagtcataatgtacggccaggggaccctggtcacggtctcctccggaggcggtgggtcaggtggcggaggcagcggtggaggaggtagtggcggtggcggtagtgggggtggaggcagcggaggcggaggcagtgggggcggtggatccgaggtgcagttggtggagtctgggggaggcttggtgcaacctggggggtctctgagactctcctgcgcagcctctggaagcatcggcggtctcaatgccatggcctggtaccgccaggctccaggaaaagagcgcgagttggtcgcaggtatttttggcgttggtagcacgaggtacgcggactccgtgaagggccgattcaccatctctagagacatcgccaagaacacggtgtttctgcaaatgaacagcctgaattctgaggacacggccgtttattactgtcggatgtcaagtgttactcgtggtagttctgactactggggtcaggggaccctggtcacggtctcgagcggagggggaggtagtgggggtggctcagaggtacaactagtggagtctgggggtggcttggtgcaaccgggtaacagtctgcgccttagctgcgcagcgtctggctttaccttcagctcctttggcatgagctgggttcgccaggctccgggaaaaggactggaatgggtttcgtctattagcggcagtggtagcgatacgctctacgcggactccgtgaagggccgtttcaccatctcccgcgataacgccaaaactacactgtatctgcaaatgaatagcctgcgtcctgaagacacggccgtttattactgtactattggtggctcgttaagccgttcttcacagggtaccctggtcaccgtctcctca

SEQ ID NO: 351 - DNA, 1446 bp, Artificial Sequence
  Nanobody sequence
atgagatttccttcaatttttactgctgttttattcgcagcatcctccgcattagctgctccagtcaacactacaacagaagatgaaacggcacaaattccggctgaagctgtcatcggttactcagatttagaaggggatttcgatgttgctgttttgccattttccaacagcacaaataacgggttattgtttataaatactactattgccagcattgctgctaaagaagaaggggtatctctcgagaaaagagaggtgcaattggtggagtctgggggaggcttggtgcaacctggggggtctctgagactctcctgcgcagcctctggaagcatcggcggtctcaatgccatggcctggtaccgccaggctccaggaaaagagcgcgagttggtcgcaggtatttttggcgttggtagcacgaggtacgcggactccgtgaagggccgattcaccatctctagagacatcgccaagaacacggtgtttctgcaaatgaacagcctgaattctgaggacacggccgtttattactgtcggatgtcaagtgttactcgtggtagttctgactactggggtcaggggaccctggtcacggtctcctccggaggcggtgggtcaggtggcggaggcagcggtggaggaggtagtggcggtggcggtagtgggggtggaggcagcggaggcggaggcagtgggggcggtggatccgaggtgcagttggtggagtctgggggaggcttggtgcagcctggggggtctctgggactctcctgtgtagcctctggaagcatcttcagaatcaatgccatggcctggtaccgccaggctccagggaagcagcgcgagttggtcgcggaaattactgctggtggtagcacaaactatgcagactccgtgaagggccgattcaccatctccgtagacaacgcctggaacacgctgtatctgcaaatgaacagcctgaaagttgaggacacggccgtctattactgtaatctagatcattatacgacatgggatagacggagtgcctactggggccaggggaccctggtcacggtctcgagcggagggggaggtagtgggggtggctcagaggtacaactagtggagtctgggggtggcttggtgcaaccgggtaacagtctgcgccttagctgcgcagcgtctggctttaccttcagctcctttggcatgagctgggttcgccaggctccgggaaaaggactggaatgggtttcgtctattagcggcagtggtagcgatacgctctacgcggactccgtgaagggccgtttcaccatctcccgcgataacgccaaaactacactgtatctgcaaatgaatagcctgcgtcctgaagacacggccgtttattactgtactattggtggctcgttaagccgttcttcacagggtaccctggtcaccgtctcctca

SEQ ID NO: 352 - DNA, 1425 bp, Artificial Sequence
  Nanobody sequence
atgagatttccttcaatttttactgctgttttattcgcagcatcctccgcattagctgctccagtcaacactacaacagaagatgaaacggcacaaattccggctgaagctgtcatcggttactcagatttagaaggggatttcgatgttgctgttttgccattttccaacagcacaaataacgggttattgtttataaatactactattgccagcattgctgctaaagaagaaggggtatctctcgagaaaagagaggtgcaattggtggagtctgggggaggcttggtgcaggctggggggtctctgagactctcctgtgcagcctctggattcaccttcagtagctatcccatgagctgggtccgccaggctccaggaaaggggcccgcgtgggtctcaactgttagtcctggtggtataaccacaagctatgcagactccgtgaagggccgattcaccatctccagagacaacgccaagaacacgctgtatttgcaaatgaacagcctgaaacctgaggacacggccgtgtattactgcttaagagatctgaataataggggccaggggaccctggtcacggtctcctccggaggcggtgggtcaggtggcggaggcagcggtggaggaggtagtggcggtggcggtagtgggggtggaggcagcggaggcggaggcagtgggggcggtggatccgaggtgcagttggtggagtctgggggaggcttggtgcaacctggggggtctctgagactctcctgcgcagcctctggaagcatcggcggtctcaatgccatggcctggtaccgccaggctccaggaaaagagcgcgagttggtcgcaggtatttttggcgttggtagcacgaggtacgcggactccgtgaagggccgattcaccatctctagagacatcgccaagaacacggtgtttctgcaaatgaacagcctgaattctgaggacacggccgtttattactgtcggatgtcaagtgttactcgtggtagttctgactactggggtcaggggaccctggtcacggtctcgagcggagggggaggtagtgggggtggctcagaggtacaactagtggagtctgggggtggcttggtgcaaccgggtaacagtctgcgccttagctgcgcagcgtctggctttaccttcagctcctttggcatgagctgggttcgccaggctccgggaaaaggactggaatgggtttcgtctattagcggcagtggtagcgatacgctctacgcggactccgtgaagggccgtttcaccatctcccgcgataacgccaaaactacactgtatctgcaaatgaatagcctgcgtcctgaagacacggccgtttattactgtactattggtggctcgttaagccgttcttcacagggtaccctggtcaccgtctcctca

SEQ ID NO: 353 - DNA, 1440 bp, Artificial Sequence
  Nanobody sequence
atgagatttccttcaatttttactgctgttttattcgcagcatcctccgcattagctgctccagtcaacactacaacagaagatgaaacggcacaaattccggctgaagctgtcatcggttactcagatttagaaggggatttcgatgttgctgttttgccattttccaacagcacaaataacgggttattgtttataaatactactattgccagcattgctgctaaagaagaaggggtatctctcgagaaaagagaggtgcaattggtggagtctgggggaggcttggtgcaacctggggggtctctgagactctcctgcgcagcctctggaagcatcggcggtctcaatgccatggcctggtaccgccaggctccaggaaaagagcgcgagttggtcgcaggtatttttggcgttggtagcacgaggtacgcggactccgtgaagggccgattcaccatctctagagacatcgccaagaacacggtgtttctgcaaatgaacagcctgaattctgaggacacggccgtttattactgtcggatgtcaagtgttactcgtggtagttctgactactggggtcaggggaccctggtcacggtctcctccggaggcggtgggtcaggtggcggaggcagcggtggaggaggtagtggcggtggcggtagtgggggtggaggcagcggaggcggaggcagtgggggcggtggatccgaggtgcagttggtggagtctgggggaggcttggtgcaacctggggggtctctgagactctcctgcgcagcctctggaagcatcggcggtctcaatgccatggcctggtaccgccaggctccaggaaaagagcgcgagttggtcgcaggtatttttggcgttggtagcacgaggtacgcggactccgtgaagggccgattcaccatctctagagacatcgccaagaacacggtgtttctgcaaatgaacagcctgaattctgaggacacggccgtttattactgtcggatgtcaagtgttactcgtggtagttctgactactggggtcaggggaccctggtcacggtctcgagcggagggggaggtagtgggggtggctcagaggtacaactagtggagtctgggggtggcttggtgcaaccgggtaacagtctgcgccttagctgcgcagcgtctggctttaccttcagctcctttggcatgagctgggttcgccaggctccgggaaaaggactggaatgggtttcgtctattagcggcagtggtagcgatacgctctacgcggactccgtgaagggccgtttcaccatctcccgcgataacgccaaaactacactgtatctgcaaatgaatagcctgcgtcctgaagacacggccgtttattactgtactattggtggctcgttaagccgttcttcacagggtaccctggtcaccgtctcctca

SEQ ID NO: 354 - DNA, 1425 bp, Artificial Sequence
  Nanobody sequence
atgagatttccttcaatttttactgctgttttattcgcagcatcctccgcattagctgctccagtcaacactacaacagaagatgaaacggcacaaattccggctgaagctgtcatcggttactcagatttagaaggggatttcgatgttgctgttttgccattttccaacagcacaaataacgggttattgtttataaatactactattgccagcattgctgctaaagaagaaggggtatctctcgagaaaagagaggtgcaattggtggagtctgggggaggcttggtgcaacctggggggtctctgagactctcctgcgcagcctctggaagcatcggcggtctcaatgccatggcctggtaccgccaggctccaggaaaagagcgcgagttggtcgcaggtatttttggcgttggtagcacgaggtacgcggactccgtgaagggccgattcaccatctctagagacatcgccaagaacacggtgtttctgcaaatgaacagcctgaattctgaggacacggccgtttattactgtcggatgtcaagtgttactcgtggtagttctgactactggggtcaggggaccctggtcacggtctcctccggaggcggtgggtcaggtggcggaggcagcggtggaggaggtagtggcggtggcggtagtgggggtggaggcagcggaggcggaggcagtgggggcggtggatccgaggtgcagttggtggagtctgggggaggcttggtgcaggctggggggtctctgagactctcctgtgcagcctctggattcaccttcagtagctatcccatgagctgggtccgccaggctccaggaaaggggcccgcgtgggtctcaactgttagtcctggtggtataaccacaagctatgcagactccgtgaagggccgattcaccatctccagagacaacgccaagaacacgctgtatttgcaaatgaacagcctgaaacctgaggacacggccgtgtattactgcttaagagatctgaataataggggccaggggaccctggtcacggtctcgagcggagggggaggtagtgggggtggctcagaggtacaactagtggagtctgggggtggcttggtgcaaccgggtaacagtctgcgccttagctgcgcagcgtctggctttaccttcagctcctttggcatgagctgggttcgccaggctccgggaaaaggactggaatgggtttcgtctattagcggcagtggtagcgatacgctctacgcggactccgtgaagggccgtttcaccatctcccgcgataacgccaaaactacactgtatctgcaaatgaatagcctgcgtcctgaagacacggccgtttattactgtactattggtggctcgttaagccgttcttcacagggtaccctggtcaccgtctcctca

SEQ ID NO: 355 - DNA, 1452 bp, Artificial Sequence
  Nanobody sequence
atgagatttccttcaatttttactgctgttttattcgcagcatcctccgcattagctgctccagtcaacactacaacagaagatgaaacggcacaaattccggctgaagctgtcatcggttactcagatttagaaggggatttcgatgttgctgttttgccattttccaacagcacaaataacgggttattgtttataaatactactattgccagcattgctgctaaagaagaaggggtatctctcgagaaaagagaggtgcaattggtggagtctgggggaggcttggtgcaacctggggggtctctgagactctcctgcgcagcctctggaagcatcggcggtctcaatgccatggcctggtaccgccaggctccaggaaaagagcgcgagttggtcgcaggtatttttggcgttggtagcacgaggtacgcggactccgtgaagggccgattcaccatctctagagacatcgccaagaacacggtgtttctgcaaatgaacagcctgaattctgaggacacggccgtttattactgtcggatgtcaagtgttactcgtggtagttctgactactggggtcaggggaccctggtcacggtctcctccggaggcggtgggtcaggtggcggaggcagcggtggaggaggtagtggcggtggcggtagtgggggtggaggcagcggaggcggaggcagtgggggcggtggatccgaggtgcagttggtggagtctgggggaggcttggtgcagcctggggggtctctgagactctcctgtgcagcctctggaacgctcttcaaaatcaacgccatgggctggtaccgccaggctccagggaagcggcgcgagttggtcgcacttattactagtagcgatacaacggattatgcagagtccgtggagggccgattcaccatctccagagacaacacgtggaacgcggtgtatctgcaaatgaacagtctgaaacctgaggatacggccgtctattactgtcactcagatcattactcgatgggtgtgcctgaaaagcgagtcataatgtacggccaggggaccctggtcacggtctcgagcggagggggaggtagtgggggtggctcagaggtacaactagtggagtctgggggtggcttggtgcaaccgggtaacagtctgcgccttagctgcgcagcgtctggctttaccttcagctcctttggcatgagctgggttcgccaggctccgggaaaaggactggaatgggtttcgtctattagcggcagtggtagcgatacgctctacgcggactccgtgaagggccgtttcaccatctcccgcgataacgccaaaactacactgtatctgcaaatgaatagcctgcgtcctgaagacacggccgtttattactgtactattggtggctcgttaagccgttcttcacagggtaccctggtcaccgtctcctca

SEQ ID NO: 356 - DNA, 1461 bp, Artificial Sequence
  Nanobody sequence
atgagatttccttcaatttttactgctgttttattcgcagcatcctccgcattagctgctccagtcaacactacaacagaagatgaaacggcacaaattccggctgaagctgtcatcggttactcagatttagaaggggatttcgatgttgctgttttgccattttccaacagcacaaataacgggttattgtttataaatactactattgccagcattgctgctaaagaagaaggggtatctctcgagaaaagagaggtgcaattggtggagtctgggggaggattggtgcaggctgggggctctctgagactctcctgtgcagcctctggacgcacgtactatctcaatgccatgggctggttccgccagggtccagggaaggaccgtgagtttgtagcagctatagactggagtgatggtaacaaagactatgcagactccgtgaagggccgattcaccatctccagagacaacgccaagaacacggtgtatctgcaaatgaacagcctgaaacctgaggacacggccgtttattactgtgcagccgacacaccaccctgggggcctatgatctacatcgaatcgtatgactcctggggccaggggaccctggtcacggtctcctccggaggcggtgggtcaggtggcggaggcagcggtggaggaggtagtggcggtggcggtagtgggggtggaggcagcggaggcggaggcagtgggggcggtggatccgaggtgcagttggtggagtctgggggaggcttggtgcaacctggggggtctctgagactctcctgcgcagcctctggaagcatcggcggtctcaatgccatggcctggtaccgccaggctccaggaaaagagcgcgagttggtcgcaggtatttttggcgttggtagcacgaggtacgcggactccgtgaagggccgattcaccatctctagagacatcgccaagaacacggtgtttctgcaaatgaacagcctgaattctgaggacacggccgtttattactgtcggatgtcaagtgttactcgtggtagttctgactactggggtcaggggaccctggtcacggtctcgagcggagggggaggtagtgggggtggctcagaggtacaactagtggagtctgggggtggcttggtgcaaccgggtaacagtctgcgccttagctgcgcagcgtctggctttaccttcagctcctttggcatgagctgggttcgccaggctccgggaaaaggactggaatgggtttcgtctattagcggcagtggtagcgatacgctctacgcggactccgtgaagggccgtttcaccatctcccgcgataacgccaaaactacactgtatctgcaaatgaatagcctgcgtcctgaagacacggccgtttattactgtactattggtggctcgttaagccgttcttcacagggtaccctggtcaccgtctcctca

SEQ ID NO: 357 - DNA, 1461 bp, Artificial Sequence
  Nanobody sequence
atgagatttccttcaatttttactgctgttttattcgcagcatcctccgcattagctgctccagtcaacactacaacagaagatgaaacggcacaaattccggctgaagctgtcatcggttactcagatttagaaggggatttcgatgttgctgttttgccattttccaacagcacaaataacgggttattgtttataaatactactattgccagcattgctgctaaagaagaaggggtatctctcgagaaaagagaggtgcaattggtggagtctgggggaggcttggtgcaacctggggggtctctgagactctcctgcgcagcctctggaagcatcggcggtctcaatgccatggcctggtaccgccaggctccaggaaaagagcgcgagttggtcgcaggtatttttggcgttggtagcacgaggtacgcggactccgtgaagggccgattcaccatctctagagacatcgccaagaacacggtgtttctgcaaatgaacagcctgaattctgaggacacggccgtttattactgtcggatgtcaagtgttactcgtggtagttctgactactggggtcaggggaccctggtcacggtctcctccggaggcggtgggtcaggtggcggaggcagcggtggaggaggtagtggcggtggcggtagtgggggtggaggcagcggaggcggaggcagtgggggcggtggatccgaggtgcagttggtggagtctgggggaggattggtgcaggctgggggctctctgagactctcctgtgcagcctctggacgcacgtactatctcaatgccatgggctggttccgccagggtccagggaaggaccgtgagtttgtagcagctatagactggagtgatggtaacaaagactatgcagactccgtgaagggccgattcaccatctccagagacaacgccaagaacacggtgtatctgcaaatgaacagcctgaaacctgaggacacggccgtttattactgtgcagccgacacaccaccctgggggcctatgatctacatcgaatcgtatgactcctggggccaggggaccctggtcacggtctcgagcggagggggaggtagtgggggtggctcagaggtacaactagtggagtctgggggtggcttggtgcaaccgggtaacagtctgcgccttagctgcgcagcgtctggctttaccttcagctcctttggcatgagctgggttcgccaggctccgggaaaaggactggaatgggtttcgtctattagcggcagtggtagcgatacgctctacgcggactccgtgaagggccgtttcaccatctcccgcgataacgccaaaactacactgtatctgcaaatgaatagcctgcgtcctgaagacacggccgtttattactgtactattggtggctcgttaagccgttcttcacagggtaccctggtcaccgtctcctca

SEQ ID NO: 358 - DNA, 498 bp, Artificial Sequence
  Nanobody sequence
atgaaaaagaccgctatcgcgattgcagtggcactggctggtttggccaccgtggcccaggccgaggtgcaattggtggagtctgggggaggcttggtgcagcctggggggtctctgagactctcctgtgcagcctctggaacgctcttcaaaatcaacgccatgggctggtaccgccaggctccagggaagcggcgcgagttggtcgcacttattactagtagcgatacaacggattatgcagagtccgtggagggccgattcaccatctccagagacaacacgtggaacgcggtgtatctgcaaatgaacagtctgaaacctgaggatacggccgtctattactgtcactcagatcattactcgggtggtgtgcctgaaaagcgagtcataatgtacggccaggggaccctggtcaccgtctcctcagcggccgcagaacaaaaactcatctcagaagaggatctgaatggggccgcacatcatcatcatcatcat

SEQ ID NO: 359 - DNA, 498 bp, Artificial Sequence
  Nanobody sequence
atgaaaaagaccgctatcgcgattgcagtggcactggctggtttggccaccgtggcccaggccgaggtgcaattggtggagtctgggggaggcttggtgcagcctggggggtctctgagactctcctgtgcagcctctggaacgctcttcaaaatcaacgccatgggctggtaccgccaggctccagggaagcggcgcgagttggtcgcacttattactagtagcgatacaacggattatgcagagtccgtggagggccgattcaccatctccagagacaacacgtggaacgcggtgtatctgcaaatgaacagtctgaaacctgaggatacggccgtctattactgtcactcagatcattactcgttgggtgtgcctgaaaagcgagtcataatgtacggccaggggaccctggtcaccgtctcctcagcggccgcagaacaaaaactcatctcagaagaggatctgaatggggccgcacatcatcatcatcatcat

SEQ ID NO: 360 - DNA, 498 bp, Artificial Sequence
  Nanobody sequence
atgaaaaagaccgctatcgcgattgcagtggcactggctggtttggccaccgtggcccaggccgaggtgcaattggtggagtctgggggaggcttggtgcagcctggggggtctctgagactctcctgtgcagcctctggaacgctcttcaaaatcaacgccatgggctggtaccgccaggctccagggaagcggcgcgagttggtcgcacttattactagtagcgatacaacggattatgcagagtccgtggagggccgattcaccatctccagagacaacacgtggaacgcggtgtatctgcaaatgaacagtctgaaacctgaggatacggccgtctattactgtcactcagatcattactcgattggtgtgcctgaaaagcgagtcataatgtacggccaggggaccctggtcaccgtctcctcagcggccgcagaacaaaaactcatctcagaagaggatctgaatggggccgcacatcatcatcatcatcat

SEQ ID NO: 361 - DNA, 498 bp, Artificial Sequence
  Nanobody sequence
atgaaaaagaccgctatcgcgattgcagtggcactggctggtttggccaccgtggcccaggccgaggtgcaattggtggagtctgggggaggcttggtgcagcctggggggtctctgagactctcctgtgcagcctctggaacgctcttcaaaatcaacgccatgggctggtaccgccaggctccagggaagcggcgcgagttggtcgcacttattactagtagcgatacaacggattatgcagagtccgtggagggccgattcaccatctccagagacaacacgtggaacgcggtgtatctgcaaatgaacagtctgaaacctgaggatacggccgtctattactgtcactcagatcattactcggttggtgtgcctgaaaagcgagtcataatgtacggccaggggaccctggtcaccgtctcctcagcggccgcagaacaaaaactcatctcagaagaggatctgaatggggccgcacatcatcatcatcatcat

SEQ ID NO: 362 - DNA, 498 bp, Artificial Sequence
  Nanobody sequence
atgaaaaagaccgctatcgcgattgcagtggcactggctggtttggccaccgtggcccaggccgaggtgcaattggtggagtctgggggaggcttggtgcagcctggggggtctctgagactctcctgtgcagcctctggaacgctcttcaaaatcaacgccatgggctggtaccgccaggctccagggaagcggcgcgagttggtcgcacttattactagtagcgatacaacggattatgcagagtccgtggagggccgattcaccatctccagagacaacacgtggaacgcggtgtatctgcaaatgaacagtctgaaacctgaggatacggccgtctattactgtcactcagatcattactcgatgggtgtgcctgaaaagcgagtcatactgtacggccaggggaccctggtcaccgtctcctcagcggccgcagaacaaaaactcatctcagaagaggatctgaatggggccgcacatcatcatcatcatcat

SEQ ID NO: 363 - DNA, 498 bp, Artificial Sequence
  Nanobody sequence
atgaaaaagaccgctatcgcgattgcagtggcactggctggtttggccaccgtggcccaggccgaggtgcaattggtggagtctgggggaggcttggtgcagcctggggggtctctgagactctcctgtgcagcctctggaacgctcttcaaaatcaacgccatgggctggtaccgccaggctccagggaagcggcgcgagttggtcgcacttattactagtagcgatacaacggattatgcagagtccgtggagggccgattcaccatctccagagacaacacgtggaacgcggtgtatctgcaaatgaacagtctgaaacctgaggatacggccgtctattactgtcactcagatcattactcgatgggtgtgcctgaaaagcgagtcatagattacggccaggggaccctggtcaccgtctcctcagcggccgcagaacaaaaactcatctcagaagaggatctgaatggggccgcacatcatcatcatcatcat

SEQ ID NO: 364 - DNA, 498 bp, Artificial Sequence
  Nanobody sequence
atgaaaaagaccgctatcgcgattgcagtggcactggctggtttggccaccgtggcccaggccgaggtgcaattggtggagtctgggggaggcttggtgcagcctggggggtctctgagactctcctgtgcagcctctggaacgctcttcaaaatcaacgccatgggctggtaccgccaggctccagggaagcggcgcgagttggtcgcacttattactagtagcgatacaacggattatgcagagtccgtggagggccgattcaccatctccagagacaacacgtggaacgcggtgtatctgcaaatgaacagtctgaaacctgaggatacggccgtctattactgtcactcagatcattactcgatgggtgtgcctgaaaagcgagtcatagagtacggccaggggaccctggtcaccgtctcctcagcggccgcagaacaaaaactcatctcagaagaggatctgaatggggccgcacatcatcatcatcatcat

SEQ ID NO: 365 - DNA, 486 bp, Artificial Sequence
  Nanobody sequence
atgaaaaagaccgctatcgcgattgcagtggcactggctggtttggccaccgtggcccaggccgaggtgcaattggtggagtctgggggtggcctggttcagccgggtggtagcctgcgtctgtcttgcgcggctagcggtagcattggcggcctgaacgcgatggcatggtaccgccaagcaccgggtaaagagcgcgaattggttgccggcatctttggcgtcggtagcacccgttacgcggacagcgtcaaaggtcgtttcaccatttcgcgcgatatctccaagaataccgttttcctgcaaatgaacagcctgcgtagcgaggacacggcggtgtactattgtcgtatgagctccgtgacgcgtggtagcagcgattattggggccaggggaccctggtcaccgtctcctcagcggccgcagaacaaaaactcatctcagaagaggatctgaatggggccgcacatcatcatcatcatcat

SEQ ID NO: 366 - DNA, 486 bp, Artificial Sequence
  Nanobody sequence
atgaaaaagaccgctatcgcgattgcagtggcactggctggtttggccaccgtggcccaggccgaggtgcaattggtggagtctgggggtggtctggttcagcctggtggtagcctgcgtctgagctgtgcagcaagcggtagcattggtggtctgaatgcaatggcatggtatcgtcaggcaccgggtaaagaacgtgaactggttgcaggtatttttggtgttggtagcacccgttatgcagatagcgttaaaggtcgttttaccattagccgtgataatagcaaaaataccgtgtttctgcagatgaatagcctgcgtagcgaagataccgcagtttattattgtcgtatgagcagcgttacccgtggtagcagcgattattggggtcaggggaccctggtcaccgtctcctcagcggccgcagaacaaaaactcatctcagaagaggatctgaatggggccgcacatcatcatcatcatcat

SEQ ID NO: 367 - DNA, 486 bp, Artificial Sequence
  Nanobody sequence
atgaaaaagaccgctatcgcgattgcagtggcactggctggtttggccaccgtggcccaggccgaggtgcaattggtggagtctgggggtggtctggttcagcctggtggtagcctgcgtctgagctgtgcagcaagcggtagcattggtggtctgaatgcaatggcatggtatcgtcaggcaccgggtaaagaacgtgaactggttgcaggtatttttggtgttggtagcacccgttatgcagatagcgttaaaggtcgttttaccattagccgtgatattagcaaaaataccgtgtatctgcagatgaatagcctgcgtagcgaagataccgcagtttattattgtcgtatgagcagcgttacccgtggtagcagcgattattggggtcaggggaccctggtcaccgtctcctcagcggccgcagaacaaaaactcatctcagaagaggatctgaatggggccgcacatcatcatcatcatcat

SEQ ID NO: 368 - DNA, 486 bp, Artificial Sequence
  Nanobody sequence
atgaaaaagaccgctatcgcgattgcagtggcactggctggtttggccaccgtggcccaggccgaggtgcaattggtggagtctgggggtggcctggttcaaccgggtggtagcctgcgcctgtcctgcgcagcttcgggtagcattggtggcttgaatgccatggcgtggtaccgtcaggcaccgggtaaagagcgtgaactggtggccggcatcttcggcgttggtagcacgcgctatgcggactccgtgaagggccgtttcaccattagccgtgacatcagcaaaaacaccgtttttctgcagatgaacagcctgcgtagcgaggatacggcggtctactactgtgcgatgagctctgtcacccgcggtagcagcgattattggggccaagggaccctggtcaccgtctcctcagcggccgcagaacaaaaactcatctcagaagaggatctgaatggggccgcacatcatcatcatcatcat

SEQ ID NO: 369 - DNA, 486 bp, Artificial Sequence
  Nanobody sequence
atgaaaaagaccgctatcgcgattgcagtggcactggctggtttggccaccgtggcccaggccgaggtgcaattggtggagtctgggggtggtctggttcagcctggtggtagcctgcgtctgagctgtgcagcaagcggtagcattggtggtctgaatgcaatggcatggtatcgtcaggcaccgggtaaagaacgtgaactggttgcaggtatttttggtgttggtagcacccgttatgcagatagcgttaaaggtcgttttaccattagccgtgataatagcaaaaataccgtgtatctgcagatgaatagcctgcgtagcgaagataccgcagtttattattgtcgtatgagcagcgttacccgtggtagcagcgattattggggtcaggggaccctggtcaccgtctcctcagcggccgcagaacaaaaactcatctcagaagaggatctgaatggggccgcacatcatcatcatcatcat

SEQ ID NO: 370 - DNA, 486 bp, Artificial Sequence
  Nanobody sequence
atgaaaaagaccgctatcgcgattgcagtggcactggctggtttggccaccgtggcccaggccgaggtgcaattggtggagtctgggggtggtctggttcagcctggtggtagcctgcgtctgagctgtgcagcaagcggtagcattggtggtctgaatgcaatggcatggtatcgtcaggcaccgggtaaagaacgtgaactggttgcaggtatttttggtgttggtagcacccgttatgcagatagcgttaaaggtcgttttaccattagccgtgataatagcaaaaataccgtgtttctgcagatgaatagcctgcgtagcgaagataccgcagtttattattgtgcaatgagcagcgttacccgtggtagcagcgattattggggtcaggggaccctggtcaccgtctcctcagcggccgcagaacaaaaactcatctcagaagaggatctgaatggggccgcacatcatcatcatcatcat

SEQ ID NO: 371 - DNA, 486 bp, Artificial Sequence
  Nanobody sequence
atgaaaaagaccgctatcgcgattgcagtggcactggctggtttggccaccgtggcccaggccgaggtgcaattggtggagtctgggggtggtctggttcagcctggtggtagcctgcgtctgagctgtgcagcaagcggtagcattggtggtctgaatgcaatggcatggtatcgtcaggcaccgggtaaagaacgtgaactggttgcaggtatttttggtgttggtagcacccgttatgcagatagcgttaaaggtcgttttaccattagccgtgatattagcaaaaataccgtgtatctgcagatgaatagcctgcgtagcgaagataccgcagtttattattgtgcaatgagcagcgttacccgtggtagcagcgattattggggtcaggggaccctggtcaccgtctcctcagcggccgcagaacaaaaactcatctcagaagaggatctgaatggggccgcacatcatcatcatcatcat

SEQ ID NO: 372 - DNA, 486 bp, Artificial Sequence
  Nanobody sequence
atgaaaaagaccgctatcgcgattgcagtggcactggctggtttggccaccgtggcccaggccgaggtgcaattggtggagtctgggggtggcctggttcaaccgggtggtagcctgcgcctgagctgcgcagcgagcggtagcattggcggcctgaacgcgatggcctggtatcgccaggcaccgggcaaagagcgtgaattggttgccggcatctttggtgtgggcagcacccgttacgctgactctgtcaaaggtcgcttcacgatcagccgtgataacagcaagaataccgtgtacctgcaaatgaattcgctgcgtagcgaggacacggcggtttactattgtgcgatgtccagcgtcacccgtggttccagcgattattggggtcaggggaccctggtcaccgtctcctcagcggccgcagaacaaaaactcatctcagaagaggatctgaatggggccgcacatcatcatcatcatcat

SEQ ID NO: 373 - DNA, 486 bp, Artificial Sequence
  Nanobody sequence
atgaaaaagaccgctatcgcgattgcagtggcactggctggtttggccaccgtggcccaggccgaggtgcaattggtggagtctgggggtggtctggttcagcctggtggtagcctgcgtctgagctgtgcagcaagcggtagcattggtggtctgaatgcaatggcatggtatcgtcaggcaccgggtaaagaacgtgaactggttgcaggtatttttggtgttggtagcacccgttatgcagatagcgttaaaggtcgttttaccattagccgtgatattagcaaaaataccgtgtttctgcagatgaatagcctgcgtccagaagataccgcagtttattattgtcgtatgagcagcgttacccgtggtagcagcgattattggggtcaggggaccctggtcaccgtctcctcagcggccgcagaacaaaaactcatctcagaagaggatctgaatggggccgcacatcatcatcatcatcat

SEQ ID NO: 374 - DNA, 486 bp, Artificial Sequence
  Nanobody sequence
atgaaaaagaccgctatcgcgattgcagtggcactggctggtttggccaccgtggcccaggccgaggtgcaattggtggagtctgggggtggtctggttcagcctggtggtagcctgcgtctgagctgtgcagcaagcggtagcattggtggtctgaatgcaatggcatggtatcgtcaggcaccgggtaaagaacgtgaactggttgcaggtatttttggtgttggtagcacccgttatgcagatagcgttaaaggtcgttttaccattagccgtgatattagcaaaaataccgtgtttctgcagatgaatagcctgcgtgcggaagataccgcagtttattattgtcgtatgagcagcgttacccgtggtagcagcgattattggggtcaggggaccctggtcaccgtctcctcagcggccgcagaacaaaaactcatctcagaagaggatctgaatggggccgcacatcatcatcatcatcat

SEQ ID NO: 375 - DNA, 507 bp, Artificial Sequence
  Nanobody sequence
atgaaaaagaccgctatcgcgattgcagtggcactggctggtttggccaccgtggcccaggccgaggtgcaattggtggagtctgggggaggattggtgcaggctgggggctctctgagactctcctgtgcagcctctggacgcacgtactatctcaatgccatgggctggttccgccagggtccagggaaggaccgtgagtttgtagcagctatagactggagttatggtaacaaagactatgcagactccgtgaagggccgattcaccatctccagagacaacgccaagaacacggtgtatctgcaaatgaacagcctgaaacctgaggacacggccgtttattactgtgcagccgacacaccaccctgggggcctatgatctacatcgaatcgtatgactcctggggccaggggaccctggtcaccgtctcctcagcggccgcagaacaaaaactcatctcagaagaggatctgaatggggccgcacatcatcatcatcatcat

SEQ ID NO: 376 - DNA, 507 bp, Artificial Sequence
  Nanobody sequence
atgaaaaagaccgctatcgcgattgcagtggcactggctggtttggccaccgtggcccaggccgaggtgcaattggtggagtctgggggaggattggtgcaggctgggggctctctgagactctcctgtgcagcctctggacgcacgtactatctcaatgccatgggctggttccgccagggtccagggaaggaccgtgagtttgtagcagctatagactggagtgagggtaacaaagactatgcagactccgtgaagggccgattcaccatctccagagacaacgccaagaacacggtgtatctgcaaatgaacagcctgaaacctgaggacacggccgtttattactgtgcagccgacacaccaccctgggggcctatgatctacatcgaatcgtatgactcctggggccaggggaccctggtcaccgtctcctcagcggccgcagaacaaaaactcatctcagaagaggatctgaatggggccgcacatcatcatcatcatcat

SEQ ID NO: 377 - DNA, 507 bp, Artificial Sequence
  Nanobody sequence
atgaaaaagaccgctatcgcgattgcagtggcactggctggtttggccaccgtggcccaggccgaggtgcaattggtggagtctgggggaggattggtgcaggctgggggctctctgagactctcctgtgcagcctctggacgcacgtactatctcaatgccatgggctggttccgccagggtccagggaaggaccgtgagtttgtagcagctatagactggagtgatgcgaacaaagactatgcagactccgtgaagggccgattcaccatctccagagacaacgccaagaacacggtgtatctgcaaatgaacagcctgaaacctgaggacacggccgtttattactgtgcagccgacacaccaccctgggggcctatgatctacatcgaatcgtatgactcctggggccaggggaccctggtcaccgtctcctcagcggccgcagaacaaaaactcatctcagaagaggatctgaatggggccgcacatcatcatcatcatcat

SEQ ID NO: 378 - DNA, 507 bp, Artificial Sequence
  Nanobody sequence
atgaaaaagaccgctatcgcgattgcagtggcactggctggtttggccaccgtggcccaggccgaggtgcaattggtggagtctgggggaggattggtgcaggctgggggctctctgagactctcctgtgcagcctctggacgcacgtactatctcaatgccatgggctggttccgccagggtccagggaaggaccgtgagtttgtagcagctatagactggagtgatggtaacaaagactatgcagactccgtgaagggccgattcaccatctccagagacaacgccaagaacacggtgtatctgcaaatgaacagcctgaaacctgaggacacggccgtttattactgtgcagccgacacaccaccctgggggccttttatctacatcgaatcgtatgactcctggggccaggggaccctggtcaccgtctcctcagcggccgcagaacaaaaactcatctcagaagaggatctgaatggggccgcacatcatcatcatcatcat

SEQ ID NO: 379 - DNA, 507 bp, Artificial Sequence
  Nanobody sequence
atgaaaaagaccgctatcgcgattgcagtggcactggctggtttggccaccgtggcccaggccgaggtgcaattggtggagtctgggggaggattggtgcaggctgggggctctctgagactctcctgtgcagcctctggacgcacgtactatctcaatgccatgggctggttccgccagggtccagggaaggaccgtgagtttgtagcagctatagactggagtgatggtaacaaagactatgcagactccgtgaagggccgattcaccatctccagagacaacgccaagaacacggtgtatctgcaaatgaacagcctgaaacctgaggacacggccgtttattactgtgcagccgacacaccaccctgggggccttatatctacatcgaatcgtatgactcctggggccaggggaccctggtcaccgtctcctcagcggccgcagaacaaaaactcatctcagaagaggatctgaatggggccgcacatcatcatcatcatcat

SEQ ID NO: 380 - DNA, 507 bp, Artificial Sequence
  Nanobody sequence
atgaaaaagaccgctatcgcgattgcagtggcactggctggtttggccaccgtggcccaggccgaggtgcaattggtggagtctgggggaggattggtgcaggctgggggctctctgagactctcctgtgcagcctctggacgcacgtactatctcaatgccatgggctggttccgccagggtccagggaaggaccgtgagtttgtagcagctatagactggagtgatggtaacaaagactatgcagactccgtgaagggccgattcaccatctccagagacaacgccaagaacacggtgtatctgcaaatgaacagcctgaaacctgaggacacggccgtttattactgtgcagccgacacaccaccctgggggcctcttatctacatcgaatcgtatgactcctggggccaggggaccctggtcaccgtctcctcagcggccgcagaacaaaaactcatctcagaagaggatctgaatggggccgcacatcatcatcatcatcat

SEQ ID NO: 381 - DNA, 507 bp, Artificial Sequence
  Nanobody sequence
atgaaaaagaccgctatcgcgattgcagtggcactggctggtttggccaccgtggcccaggccgaggtgcaattggtggagtctgggggaggattggtgcaggctgggggctctctgagactctcctgtgcagcctctggacgcacgtactatctcaatgccatgggctggttccgccagggtccagggaaggaccgtgagtttgtagcagctatagactggagtgatggtaacaaagactatgcagactccgtgaagggccgattcaccatctccagagacaacgccaagaacacggtgtatctgcaaatgaacagcctgaaacctgaggacacggccgtttattactgtgcagccgacacaccaccctgggggcctatgatctacatcgaatcgtatcagtcctggggccaggggaccctggtcaccgtctcctcagcggccgcagaacaaaaactcatctcagaagaggatctgaatggggccgcacatcatcatcatcatcat

SEQ ID NO: 382 - DNA, 507 bp, Artificial Sequence
  Nanobody sequence
atgaaaaagaccgctatcgcgattgcagtggcactggctggtttggccaccgtggcccaggccgaggtgcaattggtggagtctgggggaggattggtgcaggctgggggctctctgagactctcctgtgcagcctctggacgcacgtactatctcaatgccatgggctggttccgccagggtccagggaaggaccgtgagtttgtagcagctatagactggagtgatggtaacaaagactatgcagactccgtgaagggccgattcaccatctccagagacaacgccaagaacacggtgtatctgcaaatgaacagcctgaaacctgaggacacggccgtttattactgtgcagccgacacaccaccctgggggcctatgatctacatcgaatcgtatgagtcctggggccaggggaccctggtcaccgtctcctcagcggccgcagaacaaaaactcatctcagaagaggatctgaatggggccgcacatcatcatcatcatcat

SEQ ID NO: 383 - DNA, 507 bp, Artificial Sequence
  Nanobody sequence
atgaaaaagaccgctatcgcgattgcagtggcactggctggtttggccaccgtggcccaggccgaggtgcaattggtggagtctgggggaggattggtgcaggctgggggctctctgagactctcctgtgcagcctctggacgcacgtactatctcaatgccatgggctggttccgccagggtccagggaaggaccgtgagtttgtagcagctatagactggagtgatggtaacaaagactatgcagactccgtgaagggccgattcaccatctccagagacaacgccaagaacacggtgtatctgcaaatgaacagcctgaaacctgaggacacggccgtttattactgtgcagccgacacaccaccctgggggcctatgatctacatcgaatcgtatgacgattggggccaggggaccctggtcaccgtctcctcagcggccgcagaacaaaaactcatctcagaagaggatctgaatggggccgcacatcatcatcatcatcat

SEQ ID NO: 384 - DNA, 507 bp, Artificial Sequence
  Nanobody sequence
atgaaaaagaccgctatcgcgattgcagtggcactggctggtttggccaccgtggcccaggccgaggtgcaattggtggagtctgggggaggattggtgcaggctgggggctctctgagactctcctgtgcagcctctggacgcacgtactatctcaatgccatgggctggttccgccagggtccagggaaggaccgtgagtttgtagcagctatagactggagtgatggtaacaaagactatgcagactccgtgaagggccgattcaccatctccagagacaacgccaagaacacggtgtatctgcaaatgaacagcctgaaacctgaggacacggccgtttattactgtgcagccgacacaccaccctgggggcctatgatctacatcgaatcgtatgacgagtggggccaggggaccctggtcaccgtctcctcagcggccgcagaacaaaaactcatctcagaagaggatctgaatggggccgcacatcatcatcatcatcat

SEQ ID NO: 385 - DNA, 507 bp, Artificial Sequence
  Nanobody sequence
atgaaaaagaccgctatcgcgattgcagtggcactggctggtttggccaccgtggcccaggccgaggtgcaattggtggagtctgggggaggattggtgcaggctgggggctctctgagactctcctgtgcagcctctggacgcacgtactatctcaatgccatgggctggttccgccagggtccagggaaggaccgtgagtttgtagcagctatagactggagtgatggtaacaaagactatgcagactccgtgaagggccgattcaccatctccagagacaacgccaagaacacggtgtatctgcaaatgaacagcctgaaacctgaggacacggccgtttattactgtgcagccgacacaccaccctgggggcctatgatctacatcgaatcgtatgacacgtggggccaggggaccctggtcaccgtctcctcagcggccgcagaacaaaaactcatctcagaagaggatctgaatggggccgcacatcatcatcatcatcat

SEQ ID NO: 386 - DNA, 486 bp, Artificial Sequence
  Nanobody sequence
atgaaaaagaccgctatcgcgattgcagtggcactggctggtttggccaccgtggcccaggccgaggtgcaattggtggagtctgggggtggtctggttcagcctggtggtagcctgcgtctgagctgtgcagcaagcggtagcattggtggtctgaatgcaatggcatggtatcgtcaggcaccgggtaaagaacgtgaactggttgcaggtatttttggtgttggtagcacccgttatgcagatagcgttaaaggtcgttttaccattagccgtgacaatagcaaaaacaccgtttatctgcagatgaatagcctgcgtgcagaagataccgcagtttattattgtcgcatgagcagcgttacccgtggtagcagcgattattggggtcaggggaccctggtcaccgtctcctcagcggccgcagaacaaaaactcatctcagaagaggatctgaatggggccgcacatcatcatcatcatcat

SEQ ID NO: 387 - DNA, 486 bp, Artificial Sequence
  Nanobody sequence
atgaaaaagaccgctatcgcgattgcagtggcactggctggtttggccaccgtggcccaggccgaggtgcaattggtggagtctgggggtggtctggttcagcctggtggtagcctgcgtctgagctgtgcagcaagcggtagcattggtggtctgaatgcaatggcatggtatcgtcaggcaccgggtaaagaacgtgaactggttgcaggtatttttggtgttggtagcacccgttatgcagatagcgttaaaggtcgttttaccattagccgtgacaatagcaaaaacaccgtttatctgcagatgaatagcctgcgtcctgaagataccgcagtttattattgtcgcatgagcagcgttacccgtggtagcagcgattattggggtcaggggaccctggtcaccgtctcctcagcggccgcagaacaaaaactcatctcagaagaggatctgaatggggccgcacatcatcatcatcatcat

SEQ ID NO: 388 - DNA, 486 bp, Artificial Sequence
  Nanobody sequence
atgaaaaagaccgctatcgcgattgcagtggcactggctggtttggccaccgtggcccaggccgacgtgcaattggtggagtctgggggtggtctggttcagcctggtggtagcctgcgtctgagctgtgcagcaagcggtagcattggtggtctgaatgcaatggcatggtatcgtcaggcaccgggtaaagaacgtgaactggttgcaggtatttttggtgttggtagcacccgttatgcagatagcgttaaaggtcgttttaccattagccgtgacaatagcaaaaacaccgtttatctgcagatgaatagcctgcgtgcagaagataccgcagtttattattgtcgcatgagcagcgttacccgtggtagcagcgattattggggtcaggggaccctggtcaccgtctcctcagcggccgcagaacaaaaactcatctcagaagaggatctgaatggggccgcacatcatcatcatcatcat

SEQ ID NO: 389 - DNA, 486 bp, Artificial Sequence
  Nanobody sequence
atgaaaaagaccgctatcgcgattgcagtggcactggctggtttggccaccgtggcccaggccgacgtgcaattggtggagtctgggggtggtctggttcagcctggtggtagcctgcgtctgagctgtgcagcaagcggtagcattggtggtctgaatgcaatggcatggtatcgtcaggcaccgggtaaagaacgtgaactggttgcaggtatttttggtgttggtagcacccgttatgcagatagcgttaaaggtcgttttaccattagccgtgacaatagcaaaaacaccgtttatctgcagatgaatagcctgcgtcctgaagataccgcagtttattattgtcgcatgagcagcgttacccgtggtagcagcgattattggggtcaggggaccctggtcaccgtctcctcagcggccgcagaacaaaaactcatctcagaagaggatctgaatggggccgcacatcatcatcatcatcat

SEQ ID NO: 390 - DNA, 492 bp, Artificial Sequence
  Nanobody sequence
atgaaaaagaccgctatcgcgattgcagtggcactggctggtttggccaccgtggcccaggccgaggtgcaattggtggagtctgggggtggtctggttcagcctggtggtagcctgcgtctgagctgtgcagcaagcggtagcatttttcgtattaatgcaatggcatggtatcgtcaggcaccgggtaaacagcgtgaactggttgcagaaattaccgcaggcggtagcaccaattatgcagatagcgttaaaggtcgctttaccattagccgtgataatagctggaataccctgtatctgcagatgaatagcctgcgtcctgaagataccgcagtttattattgcaacctggatcattataccacctgggatcgtcgtagcgcatattggggtcaggggaccctggtcaccgtctcctcagcggccgcagaacaaaaactcatctcagaagaggatctgaatggggccgcacatcatcatcatcatcat

SEQ ID NO: 391 - DNA, 492 bp, Artificial Sequence
  Nanobody sequence
atgaaaaagaccgctatcgcgattgcagtggcactggctggtttggccaccgtggcccaggccgaggtgcaattggtggagtctgggggtggtctggttcagcctggtggtagcctgcgtctgagctgtgcagcaagcggtagcatttttcgtattaatgcaatggcatggtatcgtcaggcaccgggtaaacagcgtgaactggttgcagaaattaccgcaggcggtagcaccaattatgcagatagcgttaaaggtcgctttaccattagccgtgataatagctggaataccctgtatctgcagatgaatagcctgcgtgcagaagataccgcagtttattattgcaacctggatcattataccacctgggatcgtcgtagcgcatattggggtcaggggaccctggtcaccgtctcctcagcggccgcagaacaaaaactcatctcagaagaggatctgaatggggccgcacatcatcatcatcatcat

SEQ ID NO: 392 - DNA, 498 bp, Artificial Sequence
  Nanobody sequence
atgaaaaagaccgctatcgcgattgcagtggcactggctggtttggccaccgtggcccaggccgaggtgcaattggtggagtctgggggtggtctggttcagcctggtggtagcctgcgtctgagctgtgcagcaagcggcaccctgtttaaaattaatgcaatgggttggtatcgccaggcaccgggtaaacagcgtgaactggttgcactgattaccagcagcgataccaccgattatgcagaagatgttaaaggtcgctttaccattagccgtgataatagctggaataccgtttatctgcagatgaatagcctgcgtcctgaagataccgcagtttattattgtcacagcgatcattatagcctgggtgtgccggaaaaacgtgttattctgtatggtcaggggaccctggtcaccgtctcctcagcggccgcagaacaaaaactcatctcagaagaggatctgaatggggccgcacatcatcatcatcatcat

SEQ ID NO: 393 - DNA, 492 bp, Artificial Sequence
  Nanobody sequence
atgaaaaagaccgctatcgcgattgcagtggcactggctggtttggccaccgtggcccaggccgacgtgcaattggtggagtctgggggtggtctggttcagcctggtggtagcctgcgtctgagctgtgcagcaagcggtagcatttttcgtattaatgcaatggcatggtatcgtcaggcaccgggtaaacagcgtgaactggttgcagaaattaccgcaggcggtagcaccaattatgcagatagcgttaaaggtcgctttaccattagccgtgataatagctggaataccctgtatctgcagatgaatagcctgcgtcctgaagataccgcagtttattattgcaacctggatcattataccacctgggatcgtcgtagcgcatattggggtcaggggaccctggtcaccgtctcctcagcggccgcagaacaaaaactcatctcagaagaggatctgaatggggccgcacatcatcatcatcatcat

SEQ ID NO: 394 - DNA, 492 bp, Artificial Sequence
  Nanobody sequence
atgaaaaagaccgctatcgcgattgcagtggcactggctggtttggccaccgtggcccaggccgacgtgcaattggtggagtctgggggtggtctggttcagcctggtggtagcctgcgtctgagctgtgcagcaagcggtagcatttttcgtattaatgcaatggcatggtatcgtcaggcaccgggtaaacagcgtgaactggttgcagaaattaccgcaggcggtagcaccaattatgcagatagcgttaaaggtcgctttaccattagccgtgataatagctggaataccctgtatctgcagatgaatagcctgcgtgcagaagataccgcagtttattattgcaacctggatcattataccacctgggatcgtcgtagcgcatattggggtcaggggaccctggtcaccgtctcctcagcggccgcagaacaaaaactcatctcagaagaggatctgaatggggccgcacatcatcatcatcatcat

SEQ ID NO: 395 - DNA, 471 bp, Artificial Sequence
  Nanobody sequence
atgaaaaagaccgctatcgcgattgcagtggcactggctggtttggccaccgtggcccaggccgaggtgcaattggtggagtctgggggtggtctggttcagcctggtggtagcctgcgtctgagctgtgcagcaagcggttttacctttagcagctatccgatgagctgggttcgtcaggcaccgggtaaaggtcctgaatgggttagcaccgttagtccgggtggaattaccaccagttatgcagatagcgttaaaggtcgttttaccattagccgtgataatagcaaaaataccctgtatctgcagatgaatagcctgcgtcctgaagataccgcagtttattattgtctgcgtgatctgggtaatcgtggtcaggggaccctggtcaccgtctcctcagcggccgcagaacaaaaactcatctcagaagaggatctgaatggggccgcacatcatcatcatcatcat

SEQ ID NO: 396 - DNA, 471 bp, Artificial Sequence
  Nanobody sequence
atgaaaaagaccgctatcgcgattgcagtggcactggctggtttggccaccgtggcccaggccgaggtgcaattggtggagtctgggggtggtctggttcagcctggtggtagcctgcgtctgagctgtgcagcaagcggttttacctttagcagctatccgatgagctgggttcgtcaggcaccgggtaaaggtccggcatgggttagcaccgttagtccgggtggtattacaaccagttatgcagatagcgttaaaggtcgttttaccattagccgtgataatagcaaaaataccctgtatctgcagatgaatagcctgcgtcctgaagataccgcagtttattattgtctgcgtgatctgggtaatcgtggtcaggggaccctggtcaccgtctcctcagcggccgcagaacaaaaactcatctcagaagaggatctgaatggggccgcacatcatcatcatcatcat

SEQ ID NO: 397 - DNA, 471 bp, Artificial Sequence
  Nanobody sequence
atgaaaaagaccgctatcgcgattgcagtggcactggctggtttggccaccgtggcccaggccgaggtgcaattggtggagtctgggggtggtctggttcagcctggtggtagcctgcgtctgagctgtgcagcaagcggttttacctttagcagctatccgatgagctgggttcgtcaggcaccgggtaaaggtcctgaatgggttagcaccgttagtccgggtggaattaccaccagttatgcagatagcgttaaaggtcgttttaccattagccgtgataatagcaaaaataccctgtatctgcagatgaatagcctgcgtcctgaagataccgcagtttattattgtctgcgtgatctgagcaatcgtggtcaggggaccctggtcaccgtctcctcagcggccgcagaacaaaaactcatctcagaagaggatctgaatggggccgcacatcatcatcatcatcat

SEQ ID NO: 398 - DNA, 471 bp, Artificial Sequence
  Nanobody sequence
atgaaaaagaccgctatcgcgattgcagtggcactggctggtttggccaccgtggcccaggccgaggtgcaattggtggagtctgggggtggtctggttcagcctggtggttctctgcgtctgagctgtgcagcaagcggttttacctttagcagctatccgatgagctgggttcgtcaggcaccgggtaaaggtccggcatgggttagcaccgttagtccgggtggaattaccaccagttatgcagatagcgttaaaggtcgttttaccattagccgtgataatagcaaaaataccctgtatctgcagatgaatagcctgcgtcctgaagataccgcagtttattattgtctgcgtgatctgagcaatcgtggtcaggggaccctggtcaccgtctcctcagcggccgcagaacaaaaactcatctcagaagaggatctgaatggggccgcacatcatcatcatcatcat

SEQ ID NO: 399 - DNA, 1383 bp, Artificial Sequence
  Nanobody sequence
atgagatttccttcaatttttactgctgttttattcgcagcatcctccgcattagctgctccagtcaacactacaacagaagatgaaacggcacaaattccggctgaagctgtcatcggttactcagatttagaaggggatttcgatgttgctgttttgccattttccaacagcacaaataacgggttattgtttataaatactactattgccagcattgctgctaaagaagaaggggtatctctcgaaaagagagacgtgcaattggtggagtctgggggtggtctggttcagcctggtggtagcctgcgtctgagctgtgcagcaagcggtagcattggtggtctgaatgcaatggcatggtatcgtcaggcaccgggtaaagaacgtgaactggttgcaggtatttttggtgttggtagcacccgttatgcagatagcgttaaaggtcgttttaccattagccgtgacaatagcaaaaacaccgtttatctgcagatgaatagcctgcgtcctgaagataccgcagtttattattgtcgcatgagcagcgttacccgtggtagcagcgattattggggtcaggggaccctggtcacggtctcctcaggaggtggcggatccggcggaggtagtgaggtgcagctggtggagtctgggggtggcttggtgcaaccgggtaacagtctgcgccttagctgcgcagcgtctggctttaccttcagctcctttggcatgagctgggttcgccaggctccgggaaaaggactggaatgggtttcgtctattagcggcagtggtagcgatacgctctacgcggactccgtgaagggccgtttcaccatctcccgcgataacgccaaaactacactgtatctgcaaatgaatagcctgcgtcctgaagacacggccgtttattactgtactattggtggctcgttaagccgttcttcacaggggaccctggtcacggtctcctcaggaggtggcgggtccggaggaggtagtgaggtgcagctggtggagtctgggggtggtctggttcagcctggtggtagcctgcgtctgagctgtgcagcaagcggtcgtacctattatctgaatgcaatgggttggtttcgtcaggcaccgggtaaagaacgtgaatttgttgcagccattgattggagcgaaggcaataaagattatgccgatagcgtgaaaggtcgttttaccattagccgtgataacagcaaaaacaccgtttatctgcagatgaatagcctgcgtcctgaagataccgcagtttattattgtgcagcagatacccctccgtggggtccgctgatttatattgaaagctatgatagctggggtcaggggaccctggtcaccgtctcctca

SEQ ID NO: 400 - DNA, 1539 bp, Artificial Sequence
  Nanobody sequence
atgagatttccttcaatttttactgctgttttattcgcagcatcctccgcattagctgctccagtcaacactacaacagaagatgaaacggcacaaattccggctgaagctgtcatcggttactcagatttagaaggggatttcgatgttgctgttttgccattttccaacagcacaaataacgggttattgtttataaatactactattgccagcattgctgctaaagaagaaggggtatctctcgaaaagagagacgtgcaattggtggagtctgggggtggtctggttcagcctggtggtagcctgcgtctgagctgtgcagcaagcggtagcattggtggtctgaatgcaatggcatggtatcgtcaggcaccgggtaaagaacgtgaactggttgcaggtatttttggtgttggtagcacccgttatgcagatagcgttaaaggtcgttttaccattagccgtgacaatagcaaaaacaccgtttatctgcagatgaatagcctgcgtcctgaagataccgcagtttattattgtcgcatgagcagcgttacccgtggtagcagcgattattggggtcaggggaccctggtcacggtctcctccggaggcggtgggtcaggtggcggaggcagcggtggaggaggtagtggcggtggcggtagtgggggtggaggcagcggaggcggaggcagtgggggcggtggatccgaggtgcagttggtggagtctgggggtggcttggtgcaaccgggtaacagtctgcgccttagctgcgcagcgtctggctttaccttcagctcctttggcatgagctgggttcgccaggctccgggaaaaggactggaatgggtttcgtctattagcggcagtggtagcgatacgctctacgcggactccgtgaagggccgtttcaccatctcccgcgataacgccaaaactacactgtatctgcaaatgaatagcctgcgtcctgaagacacggccgtttattactgtactattggtggctcgttaagccgttcttcacaggggaccctggtcacggtctcgagcggaggcggtgggtcaggtggcggaggcagcggtggaggaggtagtggcggtggcggtagtgggggtggaggcagcggaggcggaggcagtgggggcggtggctcagaggtacaactagtggagtctgggggtggtctggttcagcctggtggtagcctgcgtctgagctgtgcagcaagcggtcgtacctattatctgaatgcaatgggttggtttcgtcaggcaccgggtaaagaacgtgaatttgttgcagccattgattggagcgaaggcaataaagattatgccgatagcgtgaaaggtcgttttaccattagccgtgataacagcaaaaacaccgtttatctgcagatgaatagcctgcgtcctgaagataccgcagtttattattgtgcagcagatacccctccgtggggtccgctgatttatattgaaagctatgatagctggggtcaggggaccctggtcaccgtctcctca

SEQ ID NO: 401 - DNA, 1383 bp, Artificial Sequence
  Nanobody sequence
atgagatttccttcaatttttactgctgttttattcgcagcatcctccgcattagctgctccagtcaacactacaacagaagatgaaacggcacaaattccggctgaagctgtcatcggttactcagatttagaaggggatttcgatgttgctgttttgccattttccaacagcacaaataacgggttattgtttataaatactactattgccagcattgctgctaaagaagaaggggtatctctcgaaaagagagacgtgcaattggtggagtctgggggtggtctggttcagcctggtggtagcctgcgtctgagctgtgcagcaagcggtagcattggtggtctgaatgcaatggcatggtatcgtcaggcaccgggtaaagaacgtgaactggttgcaggtatttttggtgttggtagcacccgttatgcagatagcgttaaaggtcgttttaccattagccgtgacaatagcaaaaacaccgtttatctgcagatgaatagcctgcgtcctgaagataccgcagtttattattgtcgcatgagcagcgttacccgtggtagcagcgattattggggtcaggggaccctggtcacggtctcctcaggaggtggcggatccggcggaggtagtgaggtgcagctggtggagtctgggggtggtctggttcagcctggtggtagcctgcgtctgagctgtgcagcaagcggtcgtacctattatctgaatgcaatgggttggtttcgtcaggcaccgggtaaagaacgtgaatttgttgcagccattgattggagcgaaggcaataaagattatgccgatagcgtgaaaggtcgttttaccattagccgtgataacagcaaaaacaccgtttatctgcagatgaatagcctgcgtcctgaagataccgcagtttattattgtgcagcagatacccctccgtggggtccgctgatttatattgaaagctatgatagctggggtcaggggaccctggtcacggtctcctcaggaggtggcgggtccggaggaggtagtgaggtgcagctggtggagtctgggggtggcttggtgcaaccgggtaacagtctgcgccttagctgcgcagcgtctggctttaccttcagctcctttggcatgagctgggttcgccaggctccgggaaaaggactggaatgggtttcgtctattagcggcagtggtagcgatacgctctacgcggactccgtgaagggccgtttcaccatctcccgcgataacgccaaaactacactgtatctgcaaatgaatagcctgcgtcctgaagacacggccgtttattactgtactattggtggctcgttaagccgttcttcacaggggaccctggtcaccgtctcctca

SEQ ID NO: 402 - DNA, 1539 bp, Artificial Sequence
  Nanobody sequence
atgagatttccttcaatttttactgctgttttattcgcagcatcctccgcattagctgctccagtcaacactacaacagaagatgaaacggcacaaattccggctgaagctgtcatcggttactcagatttagaaggggatttcgatgttgctgttttgccattttccaacagcacaaataacgggttattgtttataaatactactattgccagcattgctgctaaagaagaaggggtatctctcgaaaagagagacgtgcaattggtggagtctgggggtggtctggttcagcctggtggtagcctgcgtctgagctgtgcagcaagcggtagcattggtggtctgaatgcaatggcatggtatcgtcaggcaccgggtaaagaacgtgaactggttgcaggtatttttggtgttggtagcacccgttatgcagatagcgttaaaggtcgttttaccattagccgtgacaatagcaaaaacaccgtttatctgcagatgaatagcctgcgtcctgaagataccgcagtttattattgtcgcatgagcagcgttacccgtggtagcagcgattattggggtcaggggaccctggtcacggtctcctccggaggcggtgggtcaggtggcggaggcagcggtggaggaggtagtggcggtggcggtagtgggggtggaggcagcggaggcggaggcagtgggggcggtggatccgaggtgcagttggtggagtctgggggtggtctggttcagcctggtggtagcctgcgtctgagctgtgcagcaagcggtcgtacctattatctgaatgcaatgggttggtttcgtcaggcaccgggtaaagaacgtgaatttgttgcagccattgattggagcgaaggcaataaagattatgccgatagcgtgaaaggtcgttttaccattagccgtgataacagcaaaaacaccgtttatctgcagatgaatagcctgcgtcctgaagataccgcagtttattattgtgcagcagatacccctccgtggggtccgctgatttatattgaaagctatgatagctggggtcaggggaccctggtcacggtctcgagcggaggcggtgggtcaggtggcggaggcagcggtggaggaggtagtggcggtggcggtagtgggggtggaggcagcggaggcggaggcagtgggggcggtggctcagaggtacaactagtggagtctgggggtggcttggtgcaaccgggtaacagtctgcgccttagctgcgcagcgtctggctttaccttcagctcctttggcatgagctgggttcgccaggctccgggaaaaggactggaatgggtttcgtctattagcggcagtggtagcgatacgctctacgcggactccgtgaagggccgtttcaccatctcccgcgataacgccaaaactacactgtatctgcaaatgaatagcctgcgtcctgaagacacggccgtttattactgtactattggtggctcgttaagccgttcttcacaggggaccctggtcaccgtctcctca

SEQ ID NO: 403 - DNA, 1368 bp, Artificial Sequence
  Nanobody sequence
atgagatttccttcaatttttactgctgttttattcgcagcatcctccgcattagctgctccagtcaacactacaacagaagatgaaacggcacaaattccggctgaagctgtcatcggttactcagatttagaaggggatttcgatgttgctgttttgccattttccaacagcacaaataacgggttattgtttataaatactactattgccagcattgctgctaaagaagaaggggtatctctcgaaaagagagacgtgcaattggtggagtctgggggtggtctggttcagcctggtggtagcctgcgtctgagctgtgcagcaagcggtagcattggtggtctgaatgcaatggcatggtatcgtcaggcaccgggtaaagaacgtgaactggttgcaggtatttttggtgttggtagcacccgttatgcagatagcgttaaaggtcgttttaccattagccgtgacaatagcaaaaacaccgtttatctgcagatgaatagcctgcgtcctgaagataccgcagtttattattgtcgcatgagcagcgttacccgtggtagcagcgattattggggtcaggggaccctggtcacggtctcctcaggaggtggcggatccggcggaggtagtgaggtgcagctggtggagtctgggggtggcttggtgcaaccgggtaacagtctgcgccttagctgcgcagcgtctggctttaccttcagctcctttggcatgagctgggttcgccaggctccgggaaaaggactggaatgggtttcgtctattagcggcagtggtagcgatacgctctacgcggactccgtgaagggccgtttcaccatctcccgcgataacgccaaaactacactgtatctgcaaatgaatagcctgcgtcctgaagacacggccgtttattactgtactattggtggctcgttaagccgttcttcacaggggaccctggtcacggtctcctcaggaggtggcgggtccggaggaggtagtgaggtgcagctggtggagtctgggggtggtctggttcagcctggtggtagcctgcgtctgagctgtgcagcaagcggtagcatttttcgtattaatgcaatggcatggtatcgtcaggcaccgggtaaacagcgtgaactggttgcagaaattaccgcaggcggtagcaccaattatgcagatagcgttaaaggtcgctttaccattagccgtgataatagctggaataccctgtatctgcagatgaatagcctgcgtcctgaagataccgcagtttattattgcaacctggatcattataccacctgggatcgtcgtagcgcatattggggtcaggggaccctggtcaccgtctcctca

SEQ ID NO: 404 - DNA, 1524 bp, Artificial Sequence
  Nanobody sequence
atgagatttccttcaatttttactgctgttttattcgcagcatcctccgcattagctgctccagtcaacactacaacagaagatgaaacggcacaaattccggctgaagctgtcatcggttactcagatttagaaggggatttcgatgttgctgttttgccattttccaacagcacaaataacgggttattgtttataaatactactattgccagcattgctgctaaagaagaaggggtatctctcgaaaagagagacgtgcaattggtggagtctgggggtggtctggttcagcctggtggtagcctgcgtctgagctgtgcagcaagcggtagcattggtggtctgaatgcaatggcatggtatcgtcaggcaccgggtaaagaacgtgaactggttgcaggtatttttggtgttggtagcacccgttatgcagatagcgttaaaggtcgttttaccattagccgtgacaatagcaaaaacaccgtttatctgcagatgaatagcctgcgtcctgaagataccgcagtttattattgtcgcatgagcagcgttacccgtggtagcagcgattattggggtcaggggaccctggtcacggtctcctccggaggcggtgggtcaggtggcggaggcagcggtggaggaggtagtggcggtggcggtagtgggggtggaggcagcggaggcggaggcagtgggggcggtggatccgaggtgcagttggtggagtctgggggtggcttggtgcaaccgggtaacagtctgcgccttagctgcgcagcgtctggctttaccttcagctcctttggcatgagctgggttcgccaggctccgggaaaaggactggaatgggtttcgtctattagcggcagtggtagcgatacgctctacgcggactccgtgaagggccgtttcaccatctcccgcgataacgccaaaactacactgtatctgcaaatgaatagcctgcgtcctgaagacacggccgtttattactgtactattggtggctcgttaagccgttcttcacaggggaccctggtcacggtctcgagcggaggcggtgggtcaggtggcggaggcagcggtggaggaggtagtggcggtggcggtagtgggggtggaggcagcggaggcggaggcagtgggggcggtggctcagaggtacaactagtggagtctgggggtggtctggttcagcctggtggtagcctgcgtctgagctgtgcagcaagcggtagcatttttcgtattaatgcaatggcatggtatcgtcaggcaccgggtaaacagcgtgaactggttgcagaaattaccgcaggcggtagcaccaattatgcagatagcgttaaaggtcgctttaccattagccgtgataatagctggaataccctgtatctgcagatgaatagcctgcgtcctgaagataccgcagtttattattgcaacctggatcattataccacctgggatcgtcgtagcgcatattggggtcaggggaccctggtcaccgtctcctca

SEQ ID NO: 405 - DNA, 1368 bp, Artificial Sequence
  Nanobody sequence
atgagatttccttcaatttttactgctgttttattcgcagcatcctccgcattagctgctccagtcaacactacaacagaagatgaaacggcacaaattccggctgaagctgtcatcggttactcagatttagaaggggatttcgatgttgctgttttgccattttccaacagcacaaataacgggttattgtttataaatactactattgccagcattgctgctaaagaagaaggggtatctctcgaaaagagagacgtgcaattggtggagtctgggggtggtctggttcagcctggtggtagcctgcgtctgagctgtgcagcaagcggtagcattggtggtctgaatgcaatggcatggtatcgtcaggcaccgggtaaagaacgtgaactggttgcaggtatttttggtgttggtagcacccgttatgcagatagcgttaaaggtcgttttaccattagccgtgacaatagcaaaaacaccgtttatctgcagatgaatagcctgcgtcctgaagataccgcagtttattattgtcgcatgagcagcgttacccgtggtagcagcgattattggggtcaggggaccctggtcacggtctcctcaggaggtggcggatccggcggaggtagtgaggtgcagctggtggagtctgggggtggtctggttcagcctggtggtagcctgcgtctgagctgtgcagcaagcggtagcatttttcgtattaatgcaatggcatggtatcgtcaggcaccgggtaaacagcgtgaactggttgcagaaattaccgcaggcggtagcaccaattatgcagatagcgttaaaggtcgctttaccattagccgtgataatagctggaataccctgtatctgcagatgaatagcctgcgtcctgaagataccgcagtttattattgcaacctggatcattataccacctgggatcgtcgtagcgcatattggggtcaggggaccctggtcacggtctcctcaggaggtggcgggtccggaggaggtagtgaggtgcagctggtggagtctgggggtggcttggtgcaaccgggtaacagtctgcgccttagctgcgcagcgtctggctttaccttcagctcctttggcatgagctgggttcgccaggctccgggaaaaggactggaatgggtttcgtctattagcggcagtggtagcgatacgctctacgcggactccgtgaagggccgtttcaccatctcccgcgataacgccaaaactacactgtatctgcaaatgaatagcctgcgtcctgaagacacggccgtttattactgtactattggtggctcgttaagccgttcttcacaggggaccctggtcaccgtctcctca

SEQ ID NO: 406 - DNA, 1524 bp, Artificial Sequence
  Nanobody sequence
atgagatttccttcaatttttactgctgttttattcgcagcatcctccgcattagctgctccagtcaacactacaacagaagatgaaacggcacaaattccggctgaagctgtcatcggttactcagatttagaaggggatttcgatgttgctgttttgccattttccaacagcacaaataacgggttattgtttataaatactactattgccagcattgctgctaaagaagaaggggtatctctcgaaaagagagacgtgcaattggtggagtctgggggtggtctggttcagcctggtggtagcctgcgtctgagctgtgcagcaagcggtagcattggtggtctgaatgcaatggcatggtatcgtcaggcaccgggtaaagaacgtgaactggttgcaggtatttttggtgttggtagcacccgttatgcagatagcgttaaaggtcgttttaccattagccgtgacaatagcaaaaacaccgtttatctgcagatgaatagcctgcgtcctgaagataccgcagtttattattgtcgcatgagcagcgttacccgtggtagcagcgattattggggtcaggggaccctggtcacggtctcctccggaggcggtgggtcaggtggcggaggcagcggtggaggaggtagtggcggtggcggtagtgggggtggaggcagcggaggcggaggcagtgggggcggtggatccgaggtgcagttggtggagtctgggggtggtctggttcagcctggtggtagcctgcgtctgagctgtgcagcaagcggtagcatttttcgtattaatgcaatggcatggtatcgtcaggcaccgggtaaacagcgtgaactggttgcagaaattaccgcaggcggtagcaccaattatgcagatagcgttaaaggtcgctttaccattagccgtgataatagctggaataccctgtatctgcagatgaatagcctgcgtcctgaagataccgcagtttattattgcaacctggatcattataccacctgggatcgtcgtagcgcatattggggtcaggggaccctggtcacggtctcgagcggaggcggtgggtcaggtggcggaggcagcggtggaggaggtagtggcggtggcggtagtgggggtggaggcagcggaggcggaggcagtgggggcggtggctcagaggtacaactagtggagtctgggggtggcttggtgcaaccgggtaacagtctgcgccttagctgcgcagcgtctggctttaccttcagctcctttggcatgagctgggttcgccaggctccgggaaaaggactggaatgggtttcgtctattagcggcagtggtagcgatacgctctacgcggactccgtgaagggccgtttcaccatctcccgcgataacgccaaaactacactgtatctgcaaatgaatagcctgcgtcctgaagacacggccgtttattactgtactattggtggctcgttaagccgttcttcacaggggaccctggtcaccgtctcctca

SEQ ID NO: 407 - DNA, 1374 bp, Artificial Sequence
  Nanobody sequence
atgagatttccttcaatttttactgctgttttattcgcagcatcctccgcattagctgctccagtcaacactacaacagaagatgaaacggcacaaattccggctgaagctgtcatcggttactcagatttagaaggggatttcgatgttgctgttttgccattttccaacagcacaaataacgggttattgtttataaatactactattgccagcattgctgctaaagaagaaggggtatctctcgaaaagagagacgtgcaattggtggagtctgggggtggtctggttcagcctggtggtagcctgcgtctgagctgtgcagcaagcggtagcattggtggtctgaatgcaatggcatggtatcgtcaggcaccgggtaaagaacgtgaactggttgcaggtatttttggtgttggtagcacccgttatgcagatagcgttaaaggtcgttttaccattagccgtgacaatagcaaaaacaccgtttatctgcagatgaatagcctgcgtcctgaagataccgcagtttattattgtcgcatgagcagcgttacccgtggtagcagcgattattggggtcaggggaccctggtcacggtctcctcaggaggtggcggatccggcggaggtagtgaggtgcagctggtggagtctgggggtggcttggtgcaaccgggtaacagtctgcgccttagctgcgcagcgtctggctttaccttcagctcctttggcatgagctgggttcgccaggctccgggaaaaggactggaatgggtttcgtctattagcggcagtggtagcgatacgctctacgcggactccgtgaagggccgtttcaccatctcccgcgataacgccaaaactacactgtatctgcaaatgaatagcctgcgtcctgaagacacggccgtttattactgtactattggtggctcgttaagccgttcttcacaggggaccctggtcacggtctcctcaggaggtggcgggtccggaggaggtagtgaggtgcagctggtggagtctgggggtggtctggttcagcctggtggtagcctgcgtctgagctgtgcagcaagcggcaccctgtttaaaattaatgcaatgggttggtatcgccaggcaccgggtaaacgtcgtgaactggttgcactgattaccagcagcgataccaccgattatgcagaagatgttaaaggtcgctttaccattagccgtgataatagctggaataccgtttatctgcagatgaatagcctgcgtcctgaagataccgcagtttattattgtcacagcgatcattatagcctgggtgtgccggaaaaacgtgttattctgtatggtcaggggaccctggtcaccgtctcctca

SEQ ID NO: 408 - DNA, 1530 bp, Artificial Sequence
  Nanobody sequence
atgagatttccttcaatttttactgctgttttattcgcagcatcctccgcattagctgctccagtcaacactacaacagaagatgaaacggcacaaattccggctgaagctgtcatcggttactcagatttagaaggggatttcgatgttgctgttttgccattttccaacagcacaaataacgggttattgtttataaatactactattgccagcattgctgctaaagaagaaggggtatctctcgaaaagagagacgtgcaattggtggagtctgggggtggtctggttcagcctggtggtagcctgcgtctgagctgtgcagcaagcggtagcattggtggtctgaatgcaatggcatggtatcgtcaggcaccgggtaaagaacgtgaactggttgcaggtatttttggtgttggtagcacccgttatgcagatagcgttaaaggtcgttttaccattagccgtgacaatagcaaaaacaccgtttatctgcagatgaatagcctgcgtcctgaagataccgcagtttattattgtcgcatgagcagcgttacccgtggtagcagcgattattggggtcaggggaccctggtcacggtctcctccggaggcggtgggtcaggtggcggaggcagcggtggaggaggtagtggcggtggcggtagtgggggtggaggcagcggaggcggaggcagtgggggcggtggatccgaggtgcagttggtggagtctgggggtggcttggtgcaaccgggtaacagtctgcgccttagctgcgcagcgtctggctttaccttcagctcctttggcatgagctgggttcgccaggctccgggaaaaggactggaatgggtttcgtctattagcggcagtggtagcgatacgctctacgcggactccgtgaagggccgtttcaccatctcccgcgataacgccaaaactacactgtatctgcaaatgaatagcctgcgtcctgaagacacggccgtttattactgtactattggtggctcgttaagccgttcttcacaggggaccctggtcacggtctcgagcggaggcggtgggtcaggtggcggaggcagcggtggaggaggtagtggcggtggcggtagtgggggtggaggcagcggaggcggaggcagtgggggcggtggctcagaggtacaactagtggagtctgggggtggtctggttcagcctggtggtagcctgcgtctgagctgtgcagcaagcggcaccctgtttaaaattaatgcaatgggttggtatcgccaggcaccgggtaaacgtcgtgaactggttgcactgattaccagcagcgataccaccgattatgcagaagatgttaaaggtcgctttaccattagccgtgataatagctggaataccgtttatctgcagatgaatagcctgcgtcctgaagataccgcagtttattattgtcacagcgatcattatagcctgggtgtgccggaaaaacgtgttattctgtatggtcaggggaccctggtcaccgtctcctca

SEQ ID NO: 409 - DNA, 1374 bp, Artificial Sequence
  Nanobody sequence
atgagatttccttcaatttttactgctgttttattcgcagcatcctccgcattagctgctccagtcaacactacaacagaagatgaaacggcacaaattccggctgaagctgtcatcggttactcagatttagaaggggatttcgatgttgctgttttgccattttccaacagcacaaataacgggttattgtttataaatactactattgccagcattgctgctaaagaagaaggggtatctctcgaaaagagagacgtgcaattggtggagtctgggggtggtctggttcagcctggtggtagcctgcgtctgagctgtgcagcaagcggtagcattggtggtctgaatgcaatggcatggtatcgtcaggcaccgggtaaagaacgtgaactggttgcaggtatttttggtgttggtagcacccgttatgcagatagcgttaaaggtcgttttaccattagccgtgacaatagcaaaaacaccgtttatctgcagatgaatagcctgcgtcctgaagataccgcagtttattattgtcgcatgagcagcgttacccgtggtagcagcgattattggggtcaggggaccctggtcacggtctcctcaggaggtggcggatccggcggaggtagtgaggtgcagctggtggagtctgggggtggtctggttcagcctggtggtagcctgcgtctgagctgtgcagcaagcggcaccctgtttaaaattaatgcaatgggttggtatcgccaggcaccgggtaaacgtcgtgaactggttgcactgattaccagcagcgataccaccgattatgcagaagatgttaaaggtcgctttaccattagccgtgataatagctggaataccgtttatctgcagatgaatagcctgcgtcctgaagataccgcagtttattattgtcacagcgatcattatagcctgggtgtgccggaaaaacgtgttattctgtatggtcaggggaccctggtcacggtctcctcaggaggtggcgggtccggaggaggtagtgaggtgcagctggtggagtctgggggtggcttggtgcaaccgggtaacagtctgcgccttagctgcgcagcgtctggctttaccttcagctcctttggcatgagctgggttcgccaggctccgggaaaaggactggaatgggtttcgtctattagcggcagtggtagcgatacgctctacgcggactccgtgaagggccgtttcaccatctcccgcgataacgccaaaactacactgtatctgcaaatgaatagcctgcgtcctgaagacacggccgtttattactgtactattggtggctcgttaagccgttcttcacaggggaccctggtcaccgtctcctca

SEQ ID NO: 410 - DNA, 1530 bp, Artificial Sequence
  Nanobody sequence
atgagatttccttcaatttttactgctgttttattcgcagcatcctccgcattagctgctccagtcaacactacaacagaagatgaaacggcacaaattccggctgaagctgtcatcggttactcagatttagaaggggatttcgatgttgctgttttgccattttccaacagcacaaataacgggttattgtttataaatactactattgccagcattgctgctaaagaagaaggggtatctctcgaaaagagagacgtgcaattggtggagtctgggggtggtctggttcagcctggtggtagcctgcgtctgagctgtgcagcaagcggtagcattggtggtctgaatgcaatggcatggtatcgtcaggcaccgggtaaagaacgtgaactggttgcaggtatttttggtgttggtagcacccgttatgcagatagcgttaaaggtcgttttaccattagccgtgacaatagcaaaaacaccgtttatctgcagatgaatagcctgcgtcctgaagataccgcagtttattattgtcgcatgagcagcgttacccgtggtagcagcgattattggggtcaggggaccctggtcacggtctcctccggaggcggtgggtcaggtggcggaggcagcggtggaggaggtagtggcggtggcggtagtgggggtggaggcagcggaggcggaggcagtgggggcggtggatccgaggtgcagttggtggagtctgggggtggtctggttcagcctggtggtagcctgcgtctgagctgtgcagcaagcggcaccctgtttaaaattaatgcaatgggttggtatcgccaggcaccgggtaaacgtcgtgaactggttgcactgattaccagcagcgataccaccgattatgcagaagatgttaaaggtcgctttaccattagccgtgataatagctggaataccgtttatctgcagatgaatagcctgcgtcctgaagataccgcagtttattattgtcacagcgatcattatagcctgggtgtgccggaaaaacgtgttattctgtatggtcaggggaccctggtcacggtctcgagcggaggcggtgggtcaggtggcggaggcagcggtggaggaggtagtggcggtggcggtagtgggggtggaggcagcggaggcggaggcagtgggggcggtggctcagaggtacaactagtggagtctgggggtggcttggtgcaaccgggtaacagtctgcgccttagctgcgcagcgtctggctttaccttcagctcctttggcatgagctgggttcgccaggctccgggaaaaggactggaatgggtttcgtctattagcggcagtggtagcgatacgctctacgcggactccgtgaagggccgtttcaccatctcccgcgataacgccaaaactacactgtatctgcaaatgaatagcctgcgtcctgaagacacggccgtttattactgtactattggtggctcgttaagccgttcttcacaggggaccctggtcaccgtctcctca

SEQ ID NO: 411 - DNA, 1509 bp, Artificial Sequence
  Nanobody sequence
atgagatttccttcaatttttactgctgttttattcgcagcatcctccgcattagctgctccagtcaacactacaacagaagatgaaacggcacaaattccggctgaagctgtcatcggttactcagatttagaaggggatttcgatgttgctgttttgccattttccaacagcacaaataacgggttattgtttataaatactactattgccagcattgctgctaaagaagaaggggtatctctcgagaaaagagaggtgcaattggtggagtctgggggtggtctggttcagcctggtggtagcctgcgtctgagctgtgcagcaagcggttttacctttagcagctatccgatgagctgggttcgtcaggcaccgggtaaaggtcctgaatgggttagcaccgttagtccgggtggaattaccaccagttatgcagatagcgttaaaggtcgttttaccattagccgtgataatagcaaaaataccctgtatctgcagatgaatagcctgcgtcctgaagataccgcagtttattattgtctgcgtgatctgggtaatcgtggtcaggggaccctggtcacggtctcctccggaggcggtgggtcaggtggcggaggcagcggtggaggaggtagtggcggtggcggtagtgggggtggaggcagcggaggcggaggcagtgggggcggtggatccgaggtgcagttggtggagtctgggggtggcttggtgcaaccgggtaacagtctgcgccttagctgcgcagcgtctggctttaccttcagctcctttggcatgagctgggttcgccaggctccgggaaaaggactggaatgggtttcgtctattagcggcagtggtagcgatacgctctacgcggactccgtgaagggccgtttcaccatctcccgcgataacgccaaaactacactgtatctgcaaatgaatagcctgcgtcctgaagacacggccgtttattactgtactattggtggctcgttaagccgttcttcacaggggaccctggtcacggtctcgagcggaggcggtgggtcaggtggcggaggcagcggtggaggaggtagtggcggtggcggtagtgggggtggaggcagcggaggcggaggcagtgggggcggtggctcagaggtacaactagtggagtctgggggtggtctggttcagcctggtggtagcctgcgtctgagctgtgcagcaagcggtagcatttttcgtattaatgcaatggcatggtatcgtcaggcaccgggtaaacagcgtgaactggttgcagaaattaccgcaggcggtagcaccaattatgcagatagcgttaaaggtcgctttaccattagccgtgataatagctggaataccctgtatctgcagatgaatagcctgcgtcctgaagataccgcagtttattattgcaacctggatcattataccacctgggatcgtcgtagcgcatattggggtcaggggaccctggtcaccgtctcctca

SEQ ID NO: 412 - DNA, 1509 bp, Artificial Sequence
  Nanobody sequence
atgagatttccttcaatttttactgctgttttattcgcagcatcctccgcattagctgctccagtcaacactacaacagaagatgaaacggcacaaattccggctgaagctgtcatcggttactcagatttagaaggggatttcgatgttgctgttttgccattttccaacagcacaaataacgggttattgtttataaatactactattgccagcattgctgctaaagaagaaggggtatctctcgagaaaagagaggtgcaattggtggagtctgggggtggtctggttcagcctggtggtagcctgcgtctgagctgtgcagcaagcggttttacctttagcagctatccgatgagctgggttcgtcaggcaccgggtaaaggtccggcatgggttagcaccgttagtccgggtggtattacaaccagttatgcagatagcgttaaaggtcgttttaccattagccgtgataatagcaaaaataccctgtatctgcagatgaatagcctgcgtcctgaagataccgcagtttattattgtctgcgtgatctgggtaatcgtggtcaggggaccctggtcacggtctcctccggaggcggtgggtcaggtggcggaggcagcggtggaggaggtagtggcggtggcggtagtgggggtggaggcagcggaggcggaggcagtgggggcggtggatccgaggtgcagttggtggagtctgggggtggcttggtgcaaccgggtaacagtctgcgccttagctgcgcagcgtctggctttaccttcagctcctttggcatgagctgggttcgccaggctccgggaaaaggactggaatgggtttcgtctattagcggcagtggtagcgatacgctctacgcggactccgtgaagggccgtttcaccatctcccgcgataacgccaaaactacactgtatctgcaaatgaatagcctgcgtcctgaagacacggccgtttattactgtactattggtggctcgttaagccgttcttcacaggggaccctggtcacggtctcgagcggaggcggtgggtcaggtggcggaggcagcggtggaggaggtagtggcggtggcggtagtgggggtggaggcagcggaggcggaggcagtgggggcggtggctcagaggtacaactagtggagtctgggggtggtctggttcagcctggtggtagcctgcgtctgagctgtgcagcaagcggtagcatttttcgtattaatgcaatggcatggtatcgtcaggcaccgggtaaacagcgtgaactggttgcagaaattaccgcaggcggtagcaccaattatgcagatagcgttaaaggtcgctttaccattagccgtgataatagctggaataccctgtatctgcagatgaatagcctgcgtcctgaagataccgcagtttattattgcaacctggatcattataccacctgggatcgtcgtagcgcatattggggtcaggggaccctggtcaccgtctcctca

SEQ ID NO: 413 - DNA, 1509 bp, Artificial Sequence
  Nanobody sequence
atgagatttccttcaatttttactgctgttttattcgcagcatcctccgcattagctgctccagtcaacactacaacagaagatgaaacggcacaaattccggctgaagctgtcatcggttactcagatttagaaggggatttcgatgttgctgttttgccattttccaacagcacaaataacgggttattgtttataaatactactattgccagcattgctgctaaagaagaaggggtatctctcgaaaagagagaggtgcaattggtggagtctgggggtggtctggttcagcctggtggtagcctgcgtctgagctgtgcagcaagcggttttacctttagcagctatccgatgagctgggttcgtcaggcaccgggtaaaggtcctgaatgggttagcaccgttagtccgggtggaattaccaccagttatgcagatagcgttaaaggtcgttttaccattagccgtgataatagcaaaaataccctgtatctgcagatgaatagcctgcgtcctgaagataccgcagtttattattgtctgcgtgatctgggtaatcgtggtcaggggaccctggtcacggtctcctccggaggcggtgggtcaggtggcggaggcagcggtggaggaggtagtggcggtggcggtagtgggggtggaggcagcggaggcggaggcagtgggggcggtggatccgaggtgcagttggtggagtctgggggtggtctggttcagcctggtggtagcctgcgtctgagctgtgcagcaagcggtagcatttttcgtattaatgcaatggcatggtatcgtcaggcaccgggtaaacagcgtgaactggttgcagaaattaccgcaggcggtagcaccaattatgcagatagcgttaaaggtcgctttaccattagccgtgataatagctggaataccctgtatctgcagatgaatagcctgcgtcctgaagataccgcagtttattattgcaacctggatcattataccacctgggatcgtcgtagcgcatattggggtcaggggaccctggtcacggtctcgagcggaggcggtgggtcaggtggcggaggcagcggtggaggaggtagtggcggtggcggtagtgggggtggaggcagcggaggcggaggcagtgggggcggtggctcagaggtacaactagtggagtctgggggtggcttggtgcaaccgggtaacagtctgcgccttagctgcgcagcgtctggctttaccttcagctcctttggcatgagctgggttcgccaggctccgggaaaaggactggaatgggtttcgtctattagcggcagtggtagcgatacgctctacgcggactccgtgaagggccgtttcaccatctcccgcgataacgccaaaactacactgtatctgcaaatgaatagcctgcgtcctgaagacacggccgtttattactgtactattggtggctcgttaagccgttcttcacaggggaccctggtcaccgtctcctca

SEQ ID NO: 414 - DNA, 1509 bp, Artificial Sequence
  Nanobody sequence
atgagatttccttcaatttttactgctgttttattcgcagcatcctccgcattagctgctccagtcaacactacaacagaagatgaaacggcacaaattccggctgaagctgtcatcggttactcagatttagaaggggatttcgatgttgctgttttgccattttccaacagcacaaataacgggttattgtttataaatactactattgccagcattgctgctaaagaagaaggggtatctctcgaaaagagagaggtgcaattggtggagtctgggggtggtctggttcagcctggtggtagcctgcgtctgagctgtgcagcaagcggttttacctttagcagctatccgatgagctgggttcgtcaggcaccgggtaaaggtccggcatgggttagcaccgttagtccgggtggtattacaaccagttatgcagatagcgttaaaggtcgttttaccattagccgtgataatagcaaaaataccctgtatctgcagatgaatagcctgcgtcctgaagataccgcagtttattattgtctgcgtgatctgggtaatcgtggtcaggggaccctggtcacggtctcctccggaggcggtgggtcaggtggcggaggcagcggtggaggaggtagtggcggtggcggtagtgggggtggaggcagcggaggcggaggcagtgggggcggtggatccgaggtgcagttggtggagtctgggggtggtctggttcagcctggtggtagcctgcgtctgagctgtgcagcaagcggtagcatttttcgtattaatgcaatggcatggtatcgtcaggcaccgggtaaacagcgtgaactggttgcagaaattaccgcaggcggtagcaccaattatgcagatagcgttaaaggtcgctttaccattagccgtgataatagctggaataccctgtatctgcagatgaatagcctgcgtcctgaagataccgcagtttattattgcaacctggatcattataccacctgggatcgtcgtagcgcatattggggtcaggggaccctggtcacggtctcgagcggaggcggtgggtcaggtggcggaggcagcggtggaggaggtagtggcggtggcggtagtgggggtggaggcagcggaggcggaggcagtgggggcggtggctcagaggtacaactagtggagtctgggggtggcttggtgcaaccgggtaacagtctgcgccttagctgcgcagcgtctggctttaccttcagctcctttggcatgagctgggttcgccaggctccgggaaaaggactggaatgggtttcgtctattagcggcagtggtagcgatacgctctacgcggactccgtgaagggccgtttcaccatctcccgcgataacgccaaaactacactgtatctgcaaatgaatagcctgcgtcctgaagacacggccgtttattactgtactattggtggctcgttaagccgttcttcacaggggaccctggtcaccgtctcctca

SEQ ID NO: 415 - DNA, 1509 bp, Artificial Sequence
  Nanobody sequence
atgagatttccttcaatttttactgctgttttattcgcagcatcctccgcattagctgctccagtcaacactacaacagaagatgaaacggcacaaattccggctgaagctgtcatcggttactcagatttagaaggggatttcgatgttgctgttttgccattttccaacagcacaaataacgggttattgtttataaatactactattgccagcattgctgctaaagaagaaggggtatctctcgaaaagagagacgtgcaattggtggagtctgggggtggtctggttcagcctggtggtagcctgcgtctgagctgtgcagcaagcggtagcatttttcgtattaatgcaatggcatggtatcgtcaggcaccgggtaaacagcgtgaactggttgcagaaattaccgcaggcggtagcaccaattatgcagatagcgttaaaggtcgctttaccattagccgtgataatagctggaataccctgtatctgcagatgaatagcctgcgtcctgaagataccgcagtttattattgcaacctggatcattataccacctgggatcgtcgtagcgcatattggggtcaggggaccctggtcacggtctcctccggaggcggtgggtcaggtggcggaggcagcggtggaggaggtagtggcggtggcggtagtgggggtggaggcagcggaggcggaggcagtgggggcggtggatccgaggtgcagttggtggagtctgggggtggcttggtgcaaccgggtaacagtctgcgccttagctgcgcagcgtctggctttaccttcagctcctttggcatgagctgggttcgccaggctccgggaaaaggactggaatgggtttcgtctattagcggcagtggtagcgatacgctctacgcggactccgtgaagggccgtttcaccatctcccgcgataacgccaaaactacactgtatctgcaaatgaatagcctgcgtcctgaagacacggccgtttattactgtactattggtggctcgttaagccgttcttcacaggggaccctggtcacggtctcgagcggaggcggtgggtcaggtggcggaggcagcggtggaggaggtagtggcggtggcggtagtgggggtggaggcagcggaggcggaggcagtgggggcggtggctcagaggtacaactagtggagtctgggggtggtctggttcagcctggtggtagcctgcgtctgagctgtgcagcaagcggttttacctttagcagctatccgatgagctgggttcgtcaggcaccgggtaaaggtcctgaatgggttagcaccgttagtccgggtggaattaccaccagttatgcagatagcgttaaaggtcgttttaccattagccgtgataatagcaaaaataccctgtatctgcagatgaatagcctgcgtcctgaagataccgcagtttattattgtctgcgtgatctgggtaatcgtggtcaggggaccctggtcaccgtctcctca

SEQ ID NO: 416 - DNA, 1509 bp, Artificial Sequence
  Nanobody sequence
atgagatttccttcaatttttactgctgttttattcgcagcatcctccgcattagctgctccagtcaacactacaacagaagatgaaacggcacaaattccggctgaagctgtcatcggttactcagatttagaaggggatttcgatgttgctgttttgccattttccaacagcacaaataacgggttattgtttataaatactactattgccagcattgctgctaaagaagaaggggtatctctcgaaaagagagacgtgcaattggtggagtctgggggtggtctggttcagcctggtggtagcctgcgtctgagctgtgcagcaagcggtagcatttttcgtattaatgcaatggcatggtatcgtcaggcaccgggtaaacagcgtgaactggttgcagaaattaccgcaggcggtagcaccaattatgcagatagcgttaaaggtcgctttaccattagccgtgataatagctggaataccctgtatctgcagatgaatagcctgcgtcctgaagataccgcagtttattattgcaacctggatcattataccacctgggatcgtcgtagcgcatattggggtcaggggaccctggtcacggtctcctccggaggcggtgggtcaggtggcggaggcagcggtggaggaggtagtggcggtggcggtagtgggggtggaggcagcggaggcggaggcagtgggggcggtggatccgaggtgcagttggtggagtctgggggtggcttggtgcaaccgggtaacagtctgcgccttagctgcgcagcgtctggctttaccttcagctcctttggcatgagctgggttcgccaggctccgggaaaaggactggaatgggtttcgtctattagcggcagtggtagcgatacgctctacgcggactccgtgaagggccgtttcaccatctcccgcgataacgccaaaactacactgtatctgcaaatgaatagcctgcgtcctgaagacacggccgtttattactgtactattggtggctcgttaagccgttcttcacaggggaccctggtcacggtctcgagcggaggcggtgggtcaggtggcggaggcagcggtggaggaggtagtggcggtggcggtagtgggggtggaggcagcggaggcggaggcagtgggggcggtggctcagaggtacaactagtggagtctgggggtggtctggttcagcctggtggtagcctgcgtctgagctgtgcagcaagcggttttacctttagcagctatccgatgagctgggttcgtcaggcaccgggtaaaggtccggcatgggttagcaccgttagtccgggtggtattacaaccagttatgcagatagcgttaaaggtcgttttaccattagccgtgataatagcaaaaataccctgtatctgcagatgaatagcctgcgtcctgaagataccgcagtttattattgtctgcgtgatctgggtaatcgtggtcaggggaccctggtcaccgtctcctca

SEQ ID NO: 417 - DNA, 1509 bp, Artificial Sequence
  Nanobody sequence
atgagatttccttcaatttttactgctgttttattcgcagcatcctccgcattagctgctccagtcaacactacaacagaagatgaaacggcacaaattccggctgaagctgtcatcggttactcagatttagaaggggatttcgatgttgctgttttgccattttccaacagcacaaataacgggttattgtttataaatactactattgccagcattgctgctaaagaagaaggggtatctctcgaaaagagagacgtgcaattggtggagtctgggggtggtctggttcagcctggtggtagcctgcgtctgagctgtgcagcaagcggtagcatttttcgtattaatgcaatggcatggtatcgtcaggcaccgggtaaacagcgtgaactggttgcagaaattaccgcaggcggtagcaccaattatgcagatagcgttaaaggtcgctttaccattagccgtgataatagctggaataccctgtatctgcagatgaatagcctgcgtcctgaagataccgcagtttattattgcaacctggatcattataccacctgggatcgtcgtagcgcatattggggtcaggggaccctggtcacggtctcctccggaggcggtgggtcaggtggcggaggcagcggtggaggaggtagtggcggtggcggtagtgggggtggaggcagcggaggcggaggcagtgggggcggtggatccgaggtgcagttggtggagtctgggggtggtctggttcagcctggtggtagcctgcgtctgagctgtgcagcaagcggttttacctttagcagctatccgatgagctgggttcgtcaggcaccgggtaaaggtcctgaatgggttagcaccgttagtccgggtggaattaccaccagttatgcagatagcgttaaaggtcgttttaccattagccgtgataatagcaaaaataccctgtatctgcagatgaatagcctgcgtcctgaagataccgcagtttattattgtctgcgtgatctgggtaatcgtggtcaggggaccctggtcacggtctcgagcggaggcggtgggtcaggtggcggaggcagcggtggaggaggtagtggcggtggcggtagtgggggtggaggcagcggaggcggaggcagtgggggcggtggctcagaggtacaactagtggagtctgggggtggcttggtgcaaccgggtaacagtctgcgccttagctgcgcagcgtctggctttaccttcagctcctttggcatgagctgggttcgccaggctccgggaaaaggactggaatgggtttcgtctattagcggcagtggtagcgatacgctctacgcggactccgtgaagggccgtttcaccatctcccgcgataacgccaaaactacactgtatctgcaaatgaatagcctgcgtcctgaagacacggccgtttattactgtactattggtggctcgttaagccgttcttcacaggggaccctggtcaccgtctcctca

SEQ ID NO: 418 - DNA, 1509 bp, Artificial Sequence
  Nanobody sequence
atgagatttccttcaatttttactgctgttttattcgcagcatcctccgcattagctgctccagtcaacactacaacagaagatgaaacggcacaaattccggctgaagctgtcatcggttactcagatttagaaggggatttcgatgttgctgttttgccattttccaacagcacaaataacgggttattgtttataaatactactattgccagcattgctgctaaagaagaaggggtatctctcgaaaagagagacgtgcaattggtggagtctgggggtggtctggttcagcctggtggtagcctgcgtctgagctgtgcagcaagcggtagcatttttcgtattaatgcaatggcatggtatcgtcaggcaccgggtaaacagcgtgaactggttgcagaaattaccgcaggcggtagcaccaattatgcagatagcgttaaaggtcgctttaccattagccgtgataatagctggaataccctgtatctgcagatgaatagcctgcgtcctgaagataccgcagtttattattgcaacctggatcattataccacctgggatcgtcgtagcgcatattggggtcaggggaccctggtcacggtctcctccggaggcggtgggtcaggtggcggaggcagcggtggaggaggtagtggcggtggcggtagtgggggtggaggcagcggaggcggaggcagtgggggcggtggatccgaggtgcagttggtggagtctgggggtggtctggttcagcctggtggtagcctgcgtctgagctgtgcagcaagcggttttacctttagcagctatccgatgagctgggttcgtcaggcaccgggtaaaggtccggcatgggttagcaccgttagtccgggtggtattacaaccagttatgcagatagcgttaaaggtcgttttaccattagccgtgataatagcaaaaataccctgtatctgcagatgaatagcctgcgtcctgaagataccgcagtttattattgtctgcgtgatctgggtaatcgtggtcaggggaccctggtcacggtctcgagcggaggcggtgggtcaggtggcggaggcagcggtggaggaggtagtggcggtggcggtagtgggggtggaggcagcggaggcggaggcagtgggggcggtggctcagaggtacaactagtggagtctgggggtggcttggtgcaaccgggtaacagtctgcgccttagctgcgcagcgtctggctttaccttcagctcctttggcatgagctgggttcgccaggctccgggaaaaggactggaatgggtttcgtctattagcggcagtggtagcgatacgctctacgcggactccgtgaagggccgtttcaccatctcccgcgataacgccaaaactacactgtatctgcaaatgaatagcctgcgtcctgaagacacggccgtttattactgtactattggtggctcgttaagccgttcttcacaggggaccctggtcaccgtctcctca

SEQ ID NO: 419 - DNA, 1515 bp, Artificial Sequence
  Nanobody sequence
atgagatttccttcaatttttactgctgttttattcgcagcatcctccgcattagctgctccagtcaacactacaacagaagatgaaacggcacaaattccggctgaagctgtcatcggttactcagatttagaaggggatttcgatgttgctgttttgccattttccaacagcacaaataacgggttattgtttataaatactactattgccagcattgctgctaaagaagaaggggtatctctcgagaaaagagaggtgcaattggtggagtctgggggtggtctggttcagcctggtggtagcctgcgtctgagctgtgcagcaagcggttttacctttagcagctatccgatgagctgggttcgtcaggcaccgggtaaaggtcctgaatgggttagcaccgttagtccgggtggaattaccaccagttatgcagatagcgttaaaggtcgttttaccattagccgtgataatagcaaaaataccctgtatctgcagatgaatagcctgcgtcctgaagataccgcagtttattattgtctgcgtgatctgggtaatcgtggtcaggggaccctggtcacggtctcctccggaggcggtgggtcaggtggcggaggcagcggtggaggaggtagtggcggtggcggtagtgggggtggaggcagcggaggcggaggcagtgggggcggtggatccgaggtgcagttggtggagtctgggggtggcttggtgcaaccgggtaacagtctgcgccttagctgcgcagcgtctggctttaccttcagctcctttggcatgagctgggttcgccaggctccgggaaaaggactggaatgggtttcgtctattagcggcagtggtagcgatacgctctacgcggactccgtgaagggccgtttcaccatctcccgcgataacgccaaaactacactgtatctgcaaatgaatagcctgcgtcctgaagacacggccgtttattactgtactattggtggctcgttaagccgttcttcacaggggaccctggtcacggtctcgagcggaggcggtgggtcaggtggcggaggcagcggtggaggaggtagtggcggtggcggtagtgggggtggaggcagcggaggcggaggcagtgggggcggtggctcagaggtacaactagtggagtctgggggtggtctggttcagcctggtggtagcctgcgtctgagctgtgcagcaagcggcaccctgtttaaaattaatgcaatgggttggtatcgccaggcaccgggtaaacgtcgtgaactggttgcactgattaccagcagcgataccaccgattatgcagaagatgttaaaggtcgctttaccattagccgtgataatagctggaataccgtttatctgcagatgaatagcctgcgtcctgaagataccgcagtttattattgtcacagcgatcattatagcctgggtgtgccggaaaaacgtgttattctgtatggtcaggggaccctggtcaccgtctcctca

SEQ ID NO: 420 - DNA, 1515 bp, Artificial Sequence
  Nanobody sequence
atgagatttccttcaatttttactgctgttttattcgcagcatcctccgcattagctgctccagtcaacactacaacagaagatgaaacggcacaaattccggctgaagctgtcatcggttactcagatttagaaggggatttcgatgttgctgttttgccattttccaacagcacaaataacgggttattgtttataaatactactattgccagcattgctgctaaagaagaaggggtatctctcgagaaaagagaggtgcaattggtggagtctgggggtggtctggttcagcctggtggtagcctgcgtctgagctgtgcagcaagcggttttacctttagcagctatccgatgagctgggttcgtcaggcaccgggtaaaggtccggcatgggttagcaccgttagtccgggtggtattacaaccagttatgcagatagcgttaaaggtcgttttaccattagccgtgataatagcaaaaataccctgtatctgcagatgaatagcctgcgtcctgaagataccgcagtttattattgtctgcgtgatctgggtaatcgtggtcaggggaccctggtcacggtctcctccggaggcggtgggtcaggtggcggaggcagcggtggaggaggtagtggcggtggcggtagtgggggtggaggcagcggaggcggaggcagtgggggcggtggatccgaggtgcagttggtggagtctgggggtggcttggtgcaaccgggtaacagtctgcgccttagctgcgcagcgtctggctttaccttcagctcctttggcatgagctgggttcgccaggctccgggaaaaggactggaatgggtttcgtctattagcggcagtggtagcgatacgctctacgcggactccgtgaagggccgtttcaccatctcccgcgataacgccaaaactacactgtatctgcaaatgaatagcctgcgtcctgaagacacggccgtttattactgtactattggtggctcgttaagccgttcttcacaggggaccctggtcacggtctcgagcggaggcggtgggtcaggtggcggaggcagcggtggaggaggtagtggcggtggcggtagtgggggtggaggcagcggaggcggaggcagtgggggcggtggctcagaggtacaactagtggagtctgggggtggtctggttcagcctggtggtagcctgcgtctgagctgtgcagcaagcggcaccctgtttaaaattaatgcaatgggttggtatcgccaggcaccgggtaaacgtcgtgaactggttgcactgattaccagcagcgataccaccgattatgcagaagatgttaaaggtcgctttaccattagccgtgataatagctggaataccgtttatctgcagatgaatagcctgcgtcctgaagataccgcagtttattattgtcacagcgatcattatagcctgggtgtgccggaaaaacgtgttattctgtatggtcaggggaccctggtcaccgtctcctca

SEQ ID NO: 421 - DNA, 1515 bp, Artificial Sequence
  Nanobody sequence
atgagatttccttcaatttttactgctgttttattcgcagcatcctccgcattagctgctccagtcaacactacaacagaagatgaaacggcacaaattccggctgaagctgtcatcggttactcagatttagaaggggatttcgatgttgctgttttgccattttccaacagcacaaataacgggttattgtttataaatactactattgccagcattgctgctaaagaagaaggggtatctctcgaaaagagagaggtgcaattggtggagtctgggggtggtctggttcagcctggtggtagcctgcgtctgagctgtgcagcaagcggttttacctttagcagctatccgatgagctgggttcgtcaggcaccgggtaaaggtcctgaatgggttagcaccgttagtccgggtggaattaccaccagttatgcagatagcgttaaaggtcgttttaccattagccgtgataatagcaaaaataccctgtatctgcagatgaatagcctgcgtcctgaagataccgcagtttattattgtctgcgtgatctgggtaatcgtggtcaggggaccctggtcacggtctcctccggaggcggtgggtcaggtggcggaggcagcggtggaggaggtagtggcggtggcggtagtgggggtggaggcagcggaggcggaggcagtgggggcggtggatccgaggtgcagttggtggagtctgggggtggtctggttcagcctggtggtagcctgcgtctgagctgtgcagcaagcggcaccctgtttaaaattaatgcaatgggttggtatcgccaggcaccgggtaaacgtcgtgaactggttgcactgattaccagcagcgataccaccgattatgcagaagatgttaaaggtcgctttaccattagccgtgataatagctggaataccgtttatctgcagatgaatagcctgcgtcctgaagataccgcagtttattattgtcacagcgatcattatagcctgggtgtgccggaaaaacgtgttattctgtatggtcaggggaccctggtcacggtctcgagcggaggcggtgggtcaggtggcggaggcagcggtggaggaggtagtggcggtggcggtagtgggggtggaggcagcggaggcggaggcagtgggggcggtggctcagaggtacaactagtggagtctgggggtggcttggtgcaaccgggtaacagtctgcgccttagctgcgcagcgtctggctttaccttcagctcctttggcatgagctgggttcgccaggctccgggaaaaggactggaatgggtttcgtctattagcggcagtggtagcgatacgctctacgcggactccgtgaagggccgtttcaccatctcccgcgataacgccaaaactacactgtatctgcaaatgaatagcctgcgtcctgaagacacggccgtttattactgtactattggtggctcgttaagccgttcttcacaggggaccctggtcaccgtctcctca

SEQ ID NO: 422 - DNA, 1515 bp, Artificial Sequence
  Nanobody sequence
atgagatttccttcaatttttactgctgttttattcgcagcatcctccgcattagctgctccagtcaacactacaacagaagatgaaacggcacaaattccggctgaagctgtcatcggttactcagatttagaaggggatttcgatgttgctgttttgccattttccaacagcacaaataacgggttattgtttataaatactactattgccagcattgctgctaaagaagaaggggtatctctcgaaaagagagaggtgcaattggtggagtctgggggtggtctggttcagcctggtggtagcctgcgtctgagctgtgcagcaagcggttttacctttagcagctatccgatgagctgggttcgtcaggcaccgggtaaaggtccggcatgggttagcaccgttagtccgggtggtattacaaccagttatgcagatagcgttaaaggtcgttttaccattagccgtgataatagcaaaaataccctgtatctgcagatgaatagcctgcgtcctgaagataccgcagtttattattgtctgcgtgatctgggtaatcgtggtcaggggaccctggtcacggtctcctccggaggcggtgggtcaggtggcggaggcagcggtggaggaggtagtggcggtggcggtagtgggggtggaggcagcggaggcggaggcagtgggggcggtggatccgaggtgcagttggtggagtctgggggtggtctggttcagcctggtggtagcctgcgtctgagctgtgcagcaagcggcaccctgtttaaaattaatgcaatgggttggtatcgccaggcaccgggtaaacgtcgtgaactggttgcactgattaccagcagcgataccaccgattatgcagaagatgttaaaggtcgctttaccattagccgtgataatagctggaataccgtttatctgcagatgaatagcctgcgtcctgaagataccgcagtttattattgtcacagcgatcattatagcctgggtgtgccggaaaaacgtgttattctgtatggtcaggggaccctggtcacggtctcgagcggaggcggtgggtcaggtggcggaggcagcggtggaggaggtagtggcggtggcggtagtgggggtggaggcagcggaggcggaggcagtgggggcggtggctcagaggtacaactagtggagtctgggggtggcttggtgcaaccgggtaacagtctgcgccttagctgcgcagcgtctggctttaccttcagctcctttggcatgagctgggttcgccaggctccgggaaaaggactggaatgggtttcgtctattagcggcagtggtagcgatacgctctacgcggactccgtgaagggccgtttcaccatctcccgcgataacgccaaaactacactgtatctgcaaatgaatagcctgcgtcctgaagacacggccgtttattactgtactattggtggctcgttaagccgttcttcacaggggaccctggtcaccgtctcctca

SEQ ID NO: 423 - DNA, 1515 bp, Artificial Sequence
  Nanobody sequence
atgagatttccttcaatttttactgctgttttattcgcagcatcctccgcattagctgctccagtcaacactacaacagaagatgaaacggcacaaattccggctgaagctgtcatcggttactcagatttagaaggggatttcgatgttgctgttttgccattttccaacagcacaaataacgggttattgtttataaatactactattgccagcattgctgctaaagaagaaggggtatctctcgagaaaagagaggtgcaattggtggagtctgggggtggtctggttcagcctggtggtagcctgcgtctgagctgtgcagcaagcggcaccctgtttaaaattaatgcaatgggttggtatcgccaggcaccgggtaaacgtcgtgaactggttgcactgattaccagcagcgataccaccgattatgcagaagatgttaaaggtcgctttaccattagccgtgataatagctggaataccgtttatctgcagatgaatagcctgcgtcctgaagataccgcagtttattattgtcacagcgatcattatagcctgggtgtgccggaaaaacgtgttattctgtatggtcaggggaccctggtcacggtctcctccggaggcggtgggtcaggtggcggaggcagcggtggaggaggtagtggcggtggcggtagtgggggtggaggcagcggaggcggaggcagtgggggcggtggatccgaggtgcagttggtggagtctgggggtggcttggtgcaaccgggtaacagtctgcgccttagctgcgcagcgtctggctttaccttcagctcctttggcatgagctgggttcgccaggctccgggaaaaggactggaatgggtttcgtctattagcggcagtggtagcgatacgctctacgcggactccgtgaagggccgtttcaccatctcccgcgataacgccaaaactacactgtatctgcaaatgaatagcctgcgtcctgaagacacggccgtttattactgtactattggtggctcgttaagccgttcttcacaggggaccctggtcacggtctcgagcggaggcggtgggtcaggtggcggaggcagcggtggaggaggtagtggcggtggcggtagtgggggtggaggcagcggaggcggaggcagtgggggcggtggctcagaggtacaactagtggagtctgggggtggtctggttcagcctggtggtagcctgcgtctgagctgtgcagcaagcggttttacctttagcagctatccgatgagctgggttcgtcaggcaccgggtaaaggtcctgaatgggttagcaccgttagtccgggtggaattaccaccagttatgcagatagcgttaaaggtcgttttaccattagccgtgataatagcaaaaataccctgtatctgcagatgaatagcctgcgtcctgaagataccgcagtttattattgtctgcgtgatctgggtaatcgtggtcaggggaccctggtcaccgtctcctca

SEQ ID NO: 424 - DNA, 1515 bp, Artificial Sequence
  Nanobody sequence
atgagatttccttcaatttttactgctgttttattcgcagcatcctccgcattagctgctccagtcaacactacaacagaagatgaaacggcacaaattccggctgaagctgtcatcggttactcagatttagaaggggatttcgatgttgctgttttgccattttccaacagcacaaataacgggttattgtttataaatactactattgccagcattgctgctaaagaagaaggggtatctctcgagaaaagagaggtgcaattggtggagtctgggggtggtctggttcagcctggtggtagcctgcgtctgagctgtgcagcaagcggcaccctgtttaaaattaatgcaatgggttggtatcgccaggcaccgggtaaacgtcgtgaactggttgcactgattaccagcagcgataccaccgattatgcagaagatgttaaaggtcgctttaccattagccgtgataatagctggaataccgtttatctgcagatgaatagcctgcgtcctgaagataccgcagtttattattgtcacagcgatcattatagcctgggtgtgccggaaaaacgtgttattctgtatggtcaggggaccctggtcacggtctcctccggaggcggtgggtcaggtggcggaggcagcggtggaggaggtagtggcggtggcggtagtgggggtggaggcagcggaggcggaggcagtgggggcggtggatccgaggtgcagttggtggagtctgggggtggcttggtgcaaccgggtaacagtctgcgccttagctgcgcagcgtctggctttaccttcagctcctttggcatgagctgggttcgccaggctccgggaaaaggactggaatgggtttcgtctattagcggcagtggtagcgatacgctctacgcggactccgtgaagggccgtttcaccatctcccgcgataacgccaaaactacactgtatctgcaaatgaatagcctgcgtcctgaagacacggccgtttattactgtactattggtggctcgttaagccgttcttcacaggggaccctggtcacggtctcgagcggaggcggtgggtcaggtggcggaggcagcggtggaggaggtagtggcggtggcggtagtgggggtggaggcagcggaggcggaggcagtgggggcggtggctcagaggtacaactagtggagtctgggggtggtctggttcagcctggtggtagcctgcgtctgagctgtgcagcaagcggttttacctttagcagctatccgatgagctgggttcgtcaggcaccgggtaaaggtccggcatgggttagcaccgttagtccgggtggtattacaaccagttatgcagatagcgttaaaggtcgttttaccattagccgtgataatagcaaaaataccctgtatctgcagatgaatagcctgcgtcctgaagataccgcagtttattattgtctgcgtgatctgggtaatcgtggtcaggggaccctggtcaccgtctcctca

SEQ ID NO: 425 - DNA, 1515 bp, Artificial Sequence
  Nanobody sequence
atgagatttccttcaatttttactgctgttttattcgcagcatcctccgcattagctgctccagtcaacactacaacagaagatgaaacggcacaaattccggctgaagctgtcatcggttactcagatttagaaggggatttcgatgttgctgttttgccattttccaacagcacaaataacgggttattgtttataaatactactattgccagcattgctgctaaagaagaaggggtatctctcgaaaagagagaggtgcaattggtggagtctgggggtggtctggttcagcctggtggtagcctgcgtctgagctgtgcagcaagcggcaccctgtttaaaattaatgcaatgggttggtatcgccaggcaccgggtaaacgtcgtgaactggttgcactgattaccagcagcgataccaccgattatgcagaagatgttaaaggtcgctttaccattagccgtgataatagctggaataccgtttatctgcagatgaatagcctgcgtcctgaagataccgcagtttattattgtcacagcgatcattatagcctgggtgtgccggaaaaacgtgttattctgtatggtcaggggaccctggtcacggtctcctccggaggcggtgggtcaggtggcggaggcagcggtggaggaggtagtggcggtggcggtagtgggggtggaggcagcggaggcggaggcagtgggggcggtggatccgaggtgcagttggtggagtctgggggtggtctggttcagcctggtggtagcctgcgtctgagctgtgcagcaagcggttttacctttagcagctatccgatgagctgggttcgtcaggcaccgggtaaaggtcctgaatgggttagcaccgttagtccgggtggaattaccaccagttatgcagatagcgttaaaggtcgttttaccattagccgtgataatagcaaaaataccctgtatctgcagatgaatagcctgcgtcctgaagataccgcagtttattattgtctgcgtgatctgggtaatcgtggtcaggggaccctggtcacggtctcgagcggaggcggtgggtcaggtggcggaggcagcggtggaggaggtagtggcggtggcggtagtgggggtggaggcagcggaggcggaggcagtgggggcggtggctcagaggtacaactagtggagtctgggggtggcttggtgcaaccgggtaacagtctgcgccttagctgcgcagcgtctggctttaccttcagctcctttggcatgagctgggttcgccaggctccgggaaaaggactggaatgggtttcgtctattagcggcagtggtagcgatacgctctacgcggactccgtgaagggccgtttcaccatctcccgcgataacgccaaaactacactgtatctgcaaatgaatagcctgcgtcctgaagacacggccgtttattactgtactattggtggctcgttaagccgttcttcacaggggaccctggtcaccgtctcctca

SEQ ID NO: 426 - DNA, 1515 bp, Artificial Sequence
  Nanobody sequence
atgagatttccttcaatttttactgctgttttattcgcagcatcctccgcattagctgctccagtcaacactacaacagaagatgaaacggcacaaattccggctgaagctgtcatcggttactcagatttagaaggggatttcgatgttgctgttttgccattttccaacagcacaaataacgggttattgtttataaatactactattgccagcattgctgctaaagaagaaggggtatctctcgaaaagagagaggtgcaattggtggagtctgggggtggtctggttcagcctggtggtagcctgcgtctgagctgtgcagcaagcggcaccctgtttaaaattaatgcaatgggttggtatcgccaggcaccgggtaaacgtcgtgaactggttgcactgattaccagcagcgataccaccgattatgcagaagatgttaaaggtcgctttaccattagccgtgataatagctggaataccgtttatctgcagatgaatagcctgcgtcctgaagataccgcagtttattattgtcacagcgatcattatagcctgggtgtgccggaaaaacgtgttattctgtatggtcaggggaccctggtcacggtctcctccggaggcggtgggtcaggtggcggaggcagcggtggaggaggtagtggcggtggcggtagtgggggtggaggcagcggaggcggaggcagtgggggcggtggatccgaggtgcagttggtggagtctgggggtggtctggttcagcctggtggtagcctgcgtctgagctgtgcagcaagcggttttacctttagcagctatccgatgagctgggttcgtcaggcaccgggtaaaggtccggcatgggttagcaccgttagtccgggtggtattacaaccagttatgcagatagcgttaaaggtcgttttaccattagccgtgataatagcaaaaataccctgtatctgcagatgaatagcctgcgtcctgaagataccgcagtttattattgtctgcgtgatctgggtaatcgtggtcaggggaccctggtcacggtctcgagcggaggcggtgggtcaggtggcggaggcagcggtggaggaggtagtggcggtggcggtagtgggggtggaggcagcggaggcggaggcagtgggggcggtggctcagaggtacaactagtggagtctgggggtggcttggtgcaaccgggtaacagtctgcgccttagctgcgcagcgtctggctttaccttcagctcctttggcatgagctgggttcgccaggctccgggaaaaggactggaatgggtttcgtctattagcggcagtggtagcgatacgctctacgcggactccgtgaagggccgtttcaccatctcccgcgataacgccaaaactacactgtatctgcaaatgaatagcctgcgtcctgaagacacggccgtttattactgtactattggtggctcgttaagccgttcttcacaggggaccctggtcaccgtctcctca

SEQ ID NO: 427 - DNA, 1395 bp, Artificial Sequence
  Nanobody sequence
atgagatttccttcaatttttactgctgttttattcgcagcatcctccgcattagctgctccagtcaacactacaacagaagatgaaacggcacaaattccggctgaagctgtcatcggttactcagatttagaaggggatttcgatgttgctgttttgccattttccaacagcacaaataacgggttattgtttataaatactactattgccagcattgctgctaaagaagaaggggtatctctcgaaaagagagaggtgcaattggtggagtctgggggtggtctggttcagcctggtggtagcctgcgtctgagctgtgcagcaagcggcaccctgtttaaaattaatgcaatgggttggtatcgccaggcaccgggtaaacgtcgtgaactggttgcactgattaccagcagcgataccaccgattatgcagaagatgttaaaggtcgctttaccattagccgtgataatagctggaataccgtttatctgcagatgaatagcctgcgtcctgaagataccgcagtttattattgtcacagcgatcattatagcctgggtgtgccggaaaaacgtgttattctgtatggtcaggggaccctggtcacggtctcctcaggaggtggcggatccggcggaggtagtgaggtgcagctggtggagtctgggggtggcttggtgcaaccgggtaacagtctgcgccttagctgcgcagcgtctggctttaccttcagctcctttggcatgagctgggttcgccaggctccgggaaaaggactggaatgggtttcgtctattagcggcagtggtagcgatacgctctacgcggactccgtgaagggccgtttcaccatctcccgcgataacgccaaaactacactgtatctgcaaatgaatagcctgcgtcctgaagacacggccgtttattactgtactattggtggctcgttaagccgttcttcacaggggaccctggtcacggtctcctcaggaggtggcgggtccggaggaggtagtgaggtgcagctggtggagtctgggggtggtctggttcagcctggtggtagcctgcgtctgagctgtgcagcaagcggtcgtacctattatctgaatgcaatgggttggtttcgtcaggcaccgggtaaagaacgtgaatttgttgcagccattgattggagcgaaggcaataaagattatgccgatagcgtgaaaggtcgttttaccattagccgtgatgctagcaaaaacaccgtttatctgcagatgaatagcctgcgtcctgaagataccgcagtttattattgtgcagcagatacccctccgtggggtccgctgatttatattgaaagctatgatagctggggtcaggggaccctggtcaccgtctcctca

SEQ ID NO: 428 - DNA, 1395 bp, Artificial Sequence
  Nanobody sequence
atgagatttccttcaatttttactgctgttttattcgcagcatcctccgcattagctgctccagtcaacactacaacagaagatgaaacggcacaaattccggctgaagctgtcatcggttactcagatttagaaggggatttcgatgttgctgttttgccattttccaacagcacaaataacgggttattgtttataaatactactattgccagcattgctgctaaagaagaaggggtatctctcgaaaagagagaggtgcaattggtggagtctgggggtggtctggttcagcctggtggtagcctgcgtctgagctgtgcagcaagcggcaccctgtttaaaattaatgcaatgggttggtatcgccaggcaccgggtaaacgtcgtgaactggttgcactgattaccagcagcgataccaccgattatgcagaagatgttaaaggtcgctttaccattagccgtgataatagctggaataccgtttatctgcagatgaatagcctgcgtcctgaagataccgcagtttattattgtcacagcgatcattatagcctgggtgtgccggaaaaacgtgttattctgtatggtcaggggaccctggtcacggtctcctcaggaggtggcggatccggcggaggtagtgaggtgcagctggtggagtctgggggtggtctggttcagcctggtggtagcctgcgtctgagctgtgcagcaagcggtcgtacctattatctgaatgcaatgggttggtttcgtcaggcaccgggtaaagaacgtgaatttgttgcagccattgattggagcgaaggcaataaagattatgccgatagcgtgaaaggtcgttttaccattagccgtgatgctagcaaaaacaccgtttatctgcagatgaatagcctgcgtcctgaagataccgcagtttattattgtgcagcagatacccctccgtggggtccgctgatttatattgaaagctatgatagctggggtcaggggaccctggtcacggtctcctcaggaggtggcgggtccggaggaggtagtgaggtgcagctggtggagtctgggggtggcttggtgcaaccgggtaacagtctgcgccttagctgcgcagcgtctggctttaccttcagctcctttggcatgagctgggttcgccaggctccgggaaaaggactggaatgggtttcgtctattagcggcagtggtagcgatacgctctacgcggactccgtgaagggccgtttcaccatctcccgcgataacgccaaaactacactgtatctgcaaatgaatagcctgcgtcctgaagacacggccgtttattactgtactattggtggctcgttaagccgttcttcacaggggaccctggtcaccgtctcctca

SEQ ID NO: 429 - DNA, 1395 bp, Artificial Sequence
  Nanobody sequence
atgagatttccttcaatttttactgctgttttattcgcagcatcctccgcattagctgctccagtcaacactacaacagaagatgaaacggcacaaattccggctgaagctgtcatcggttactcagatttagaaggggatttcgatgttgctgttttgccattttccaacagcacaaataacgggttattgtttataaatactactattgccagcattgctgctaaagaagaaggggtatctctcgaaaagagagaggtgcaattggtggagtctgggggtggtctggttcagcctggtggtagcctgcgtctgagctgtgcagcaagcggtcgtacctattatctgaatgcaatgggttggtttcgtcaggcaccgggtaaagaacgtgaatttgttgcagccattgattggagcgaaggcaataaagattatgccgatagcgtgaaaggtcgttttaccattagccgtgatgctagcaaaaacaccgtttatctgcagatgaatagcctgcgtcctgaagataccgcagtttattattgtgcagcagatacccctccgtggggtccgctgatttatattgaaagctatgatagctggggtcaggggaccctggtcacggtctcctcaggaggtggcggatccggcggaggtagtgaggtgcagctggtggagtctgggggtggcttggtgcaaccgggtaacagtctgcgccttagctgcgcagcgtctggctttaccttcagctcctttggcatgagctgggttcgccaggctccgggaaaaggactggaatgggtttcgtctattagcggcagtggtagcgatacgctctacgcggactccgtgaagggccgtttcaccatctcccgcgataacgccaaaactacactgtatctgcaaatgaatagcctgcgtcctgaagacacggccgtttattactgtactattggtggctcgttaagccgttcttcacaggggaccctggtcacggtctcctcaggaggtggcgggtccggaggaggtagtgaggtgcagctggtggagtctgggggtggtctggttcagcctggtggtagcctgcgtctgagctgtgcagcaagcggcaccctgtttaaaattaatgcaatgggttggtatcgccaggcaccgggtaaacgtcgtgaactggttgcactgattaccagcagcgataccaccgattatgcagaagatgttaaaggtcgctttaccattagccgtgataatagctggaataccgtttatctgcagatgaatagcctgcgtcctgaagataccgcagtttattattgtcacagcgatcattatagcctgggtgtgccggaaaaacgtgttattctgtatggtcaggggaccctggtcaccgtctcctca

SEQ ID NO: 430 - DNA, 1395 bp, Artificial Sequence
  Nanobody sequence
atgagatttccttcaatttttactgctgttttattcgcagcatcctccgcattagctgctccagtcaacactacaacagaagatgaaacggcacaaattccggctgaagctgtcatcggttactcagatttagaaggggatttcgatgttgctgttttgccattttccaacagcacaaataacgggttattgtttataaatactactattgccagcattgctgctaaagaagaaggggtatctctcgaaaagagagaggtgcaattggtggagtctgggggtggtctggttcagcctggtggtagcctgcgtctgagctgtgcagcaagcggtcgtacctattatctgaatgcaatgggttggtttcgtcaggcaccgggtaaagaacgtgaatttgttgcagccattgattggagcgaaggcaataaagattatgccgatagcgtgaaaggtcgttttaccattagccgtgatgctagcaaaaacaccgtttatctgcagatgaatagcctgcgtcctgaagataccgcagtttattattgtgcagcagatacccctccgtggggtccgctgatttatattgaaagctatgatagctggggtcaggggaccctggtcacggtctcctcaggaggtggcggatccggcggaggtagtgaggtgcagctggtggagtctgggggtggtctggttcagcctggtggtagcctgcgtctgagctgtgcagcaagcggcaccctgtttaaaattaatgcaatgggttggtatcgccaggcaccgggtaaacgtcgtgaactggttgcactgattaccagcagcgataccaccgattatgcagaagatgttaaaggtcgctttaccattagccgtgataatagctggaataccgtttatctgcagatgaatagcctgcgtcctgaagataccgcagtttattattgtcacagcgatcattatagcctgggtgtgccggaaaaacgtgttattctgtatggtcaggggaccctggtcacggtctcctcaggaggtggcgggtccggaggaggtagtgaggtgcagctggtggagtctgggggtggcttggtgcaaccgggtaacagtctgcgccttagctgcgcagcgtctggctttaccttcagctcctttggcatgagctgggttcgccaggctccgggaaaaggactggaatgggtttcgtctattagcggcagtggtagcgatacgctctacgcggactccgtgaagggccgtttcaccatctcccgcgataacgccaaaactacactgtatctgcaaatgaatagcctgcgtcctgaagacacggccgtttattactgtactattggtggctcgttaagccgttcttcacaggggaccctggtcaccgtctcctca

SEQ ID NO: 431 - DNA, 1374 bp, Artificial Sequence
  Nanobody sequence
atgagatttccttcaatttttactgctgttttattcgcagcatcctccgcattagctgctccagtcaacactacaacagaagatgaaacggcacaaattccggctgaagctgtcatcggttactcagatttagaaggggatttcgatgttgctgttttgccattttccaacagcacaaataacgggttattgtttataaatactactattgccagcattgctgctaaagaagaaggggtatctctcgaaaagagagaggtgcaattggtggagtctgggggtggtctggttcagcctggtggtagcctgcgtctgagctgtgcagcaagcggcaccctgtttaaaattaatgcaatgggttggtatcgccaggcaccgggtaaacgtcgtgaactggttgcactgattaccagcagcgataccaccgattatgcagaagatgttaaaggtcgctttaccattagccgtgataatagctggaataccgtttatctgcagatgaatagcctgcgtcctgaagataccgcagtttattattgtcacagcgatcattatagcctgggtgtgccggaaaaacgtgttattctgtatggtcaggggaccctggtcacggtctcctcaggaggtggcggatccggcggaggtagtgaggtgcagctggtggagtctgggggtggcttggtgcaaccgggtaacagtctgcgccttagctgcgcagcgtctggctttaccttcagctcctttggcatgagctgggttcgccaggctccgggaaaaggactggaatgggtttcgtctattagcggcagtggtagcgatacgctctacgcggactccgtgaagggccgtttcaccatctcccgcgataacgccaaaactacactgtatctgcaaatgaatagcctgcgtcctgaagacacggccgtttattactgtactattggtggctcgttaagccgttcttcacaggggaccctggtcacggtctcctcaggaggtggcgggtccggaggaggtagtgaggtgcagctggtggagtctgggggtggtctggttcagcctggtggtagcctgcgtctgagctgtgcagcaagcggtagcattggtggtctgaatgcaatggcatggtatcgtcaggcaccgggtaaagaacgtgaactggttgcaggtatttttggtgttggtagcacccgttatgcagatagcgttaaaggtcgttttaccattagccgtgacaatagcaaaaacaccgtttatctgcagatgaatagcctgcgtcctgaagataccgcagtttattattgtcgcatgagcagcgttacccgtggtagcagcgattattggggtcaggggaccctggtcaccgtctcctca

SEQ ID NO: 432 - DNA, 1359 bp, Artificial Sequence
  Nanobody sequence
atgagatttccttcaatttttactgctgttttattcgcagcatcctccgcattagctgctccagtcaacactacaacagaagatgaaacggcacaaattccggctgaagctgtcatcggttactcagatttagaaggggatttcgatgttgctgttttgccattttccaacagcacaaataacgggttattgtttataaatactactattgccagcattgctgctaaagaagaaggggtatctctcgaaaagagagaggtgcaattggtggagtctgggggtggtctggttcagcctggtggtagcctgcgtctgagctgtgcagcaagcggttttacctttagcagctatccgatgagctgggttcgtcaggcaccgggtaaaggtcctgaatgggttagcaccgttagtccgggtggaattaccaccagttatgcagatagcgttaaaggtcgttttaccattagccgtgataatagcaaaaataccctgtatctgcagatgaatagcctgcgtcctgaagataccgcagtttattattgtctgcgtgatctgggtaatcgtggtcaggggaccctggtcacggtctcctcaggaggtggcggatccggcggaggtagtgaggtgcagctggtggagtctgggggtggcttggtgcaaccgggtaacagtctgcgccttagctgcgcagcgtctggctttaccttcagctcctttggcatgagctgggttcgccaggctccgggaaaaggactggaatgggtttcgtctattagcggcagtggtagcgatacgctctacgcggactccgtgaagggccgtttcaccatctcccgcgataacgccaaaactacactgtatctgcaaatgaatagcctgcgtcctgaagacacggccgtttattactgtactattggtggctcgttaagccgttcttcacaggggaccctggtcacggtctcctcaggaggtggcgggtccggaggaggtagtgaggtgcagctggtggagtctgggggtggtctggttcagcctggtggtagcctgcgtctgagctgtgcagcaagcggcaccctgtttaaaattaatgcaatgggttggtatcgccaggcaccgggtaaacgtcgtgaactggttgcactgattaccagcagcgataccaccgattatgcagaagatgttaaaggtcgctttaccattagccgtgataatagctggaataccgtttatctgcagatgaatagcctgcgtcctgaagataccgcagtttattattgtcacagcgatcattatagcctgggtgtgccggaaaaacgtgttattctgtatggtcaggggaccctggtcaccgtctcctca

SEQ ID NO: 433 - DNA, 981 bp, Artificial Sequence
  Nanobody sequence
atgagatttccttcaatttttactgctgttttattcgcagcatcctccgcattagctgctccagtcaacactacaacagaagatgaaacggcacaaattccggctgaagctgtcatcggttactcagatttagaaggggatttcgatgttgctgttttgccattttccaacagcacaaataacgggttattgtttataaatactactattgccagcattgctgctaaagaagaaggggtatctctcgaaaagagagacgtgcaattggtggagtctgggggtggtctggttcagcctggtggtagcctgcgtctgagctgtgcagcaagcggtagcattggtggtctgaatgcaatggcatggtatcgtcaggcaccgggtaaagaacgtgaactggttgcaggtatttttggtgttggtagcacccgttatgcagatagcgttaaaggtcgttttaccattagccgtgacaatagcaaaaacaccgtttatctgcagatgaatagcctgcgtcctgaagataccgcagtttattattgtcgcatgagcagcgttacccgtggtagcagcgattattggggtcaggggaccctggtcacggtctcctcaggaggtggcggatccggcggaggtagtgaggtgcagctggtggagtctgggggtggcttggtgcaaccgggtaacagtctgcgccttagctgcgcagcgtctggctttaccttcagctcctttggcatgagctgggttcgccaggctccgggaaaaggactggaatgggtttcgtctattagcggcagtggtagcgatacgctctacgcggactccgtgaagggccgtttcaccatctcccgcgataacgccaaaactacactgtatctgcaaatgaatagcctgcgtcctgaagacacggccgtttattactgtactattggtggctcgttaagccgttcttcacaggggaccctggtcaccgtctcctca

SEQ ID NO: 434 - DNA, 1395 bp, Artificial Sequence
  Nanobody sequence
atgagatttccttcaatttttactgctgttttattcgcagcatcctccgcattagctgctccagtcaacactacaacagaagatgaaacggcacaaattccggctgaagctgtcatcggttactcagatttagaaggggatttcgatgttgctgttttgccattttccaacagcacaaataacgggttattgtttataaatactactattgccagcattgctgctaaagaagaaggggtatctctcgaaaagagagaggtgcaattggtggagtctgggggtggtctggttcagcctggtggtagcctgcgtctgagctgtgcagcaagcggtcgtacctattatctgaatgcaatgggttggtttcgtcaggcaccgggtaaagaacgtgaatttgttgcagccattgattggagcgaaggcaataaagattatgccgatagcgtgaaaggtcgttttaccattagccgtgataacagcaaaaacaccgtttatctgcagatgaatagcctgcgtcctgaagataccgcagtttattattgtgcagcagatacccctccgtggggtccgctgatttatattgaaagctatgatagctggggtcaggggaccctggtcacggtctcctcaggaggtggcggatccggcggaggtagtgaggtgcagctggtggagtctgggggtggcttggtgcaaccgggtaacagtctgcgccttagctgcgcagcgtctggctttaccttcagctcctttggcatgagctgggttcgccaggctccgggaaaaggactggaatgggtttcgtctattagcggcagtggtagcgatacgctctacgcggactccgtgaagggccgtttcaccatctcccgcgataacgccaaaactacactgtatctgcaaatgaatagcctgcgtcctgaagacacggccgtttattactgtactattggtggctcgttaagccgttcttcacaggggaccctggtcacggtctcctcaggaggtggcgggtccggaggaggtagtgaggtgcagctggtggagtctgggggtggtctggttcagcctggtggtagcctgcgtctgagctgtgcagcaagcggcaccctgtttaaaattaatgcaatgggttggtatcgccaggcaccgggtaaacgtcgtgaactggttgcactgattaccagcagcgataccaccgattatgcagaagatgttaaaggtcgctttaccattagccgtgataatagctggaataccgtttatctgcagatgaatagcctgcgtcctgaagataccgcagtttattattgtcacagcgatcattatagcctgggtgtgccggaaaaacgtgttattctgtatggtcaggggaccctggtcaccgtctcctca

SEQ ID NO: 435 - DNA, 498 bp, Artificial Sequence
  Nanobody sequence
atgaaaaagaccgctatcgcgattgcagtggcactggctggtttggccaccgtggcccaggccgaggtgcaattggtggagtctgggggtggtctggttcagcctggtggtagcctgcgtctgagctgtgcagcaagcggcaccctgtttaaaattaatgcaatgggttggtatcgccaggcaccgggtaaacgtcgtgaactggttgcactgattaccagcagcgataccaccgattatgcagatagcgttaaaggtcgctttaccattagccgtgataatagctggaataccgtttatctgcagatgaatagcctgcgtcctgaagataccgcagtttattattgtcacagcgatcattatagcctgggtgtgccggaaaaacgtgttattctgtatggtcaggggaccctggtcaccgtctcctcagcggccgcagaacaaaaactcatctcagaagaggatctgaatggggccgcacatcatcatcatcatcat

SEQ ID NO: 436 - DNA, 1374 bp, Artificial Sequence
  Nanobody sequence
atgagatttccttcaatttttactgctgttttattcgcagcatcctccgcattagctgctccagtcaacactacaacagaagatgaaacggcacaaattccggctgaagctgtcatcggttactcagatttagaaggggatttcgatgttgctgttttgccattttccaacagcacaaataacgggttattgtttataaatactactattgccagcattgctgctaaagaagaaggggtatctctcgaaaagagagacgtgcaattggtggagtctgggggtggtctggttcagcctggtggtagcctgcgtctgagctgtgcagcaagcggtagcattggtggtctgaatgcaatggcatggtatcgtcaggcaccgggtaaagaacgtgaactggttgcaggtatttttggtgttggtagcacccgttatgcagatagcgttaaaggtcgttttaccattagccgtgacaatagcaaaaacaccgtttatctgcagatgaatagcctgcgtcctgaagataccgcagtttattattgtcgcatgagcagcgttacccgtggtagcagcgattattggggtcaggggaccctggtcacggtctcctcaggaggtggcggatccggcggaggtagtgaggtgcagctggtggagtctgggggtggcttggtgcaaccgggtaacagtctgcgccttagctgcgcagcgtctggctttaccttcagctcctttggcatgagctgggttcgccaggctccgggaaaaggactggaatgggtttcgtctattagcggcagtggtagcgatacgctctacgcggactccgtgaagggccgtttcaccatctcccgcgataacgccaaaactacactgtatctgcaaatgaatagcctgcgtcctgaagacacggccgtttattactgtactattggtggctcgttaagccgttcttcacaggggaccctggtcacggtctcctcaggaggtggcgggtccggaggaggtagtgaggtgcagctggtggagtctgggggtggtctggttcagcctggtggtagcctgcgtctgagctgtgcagcaagcggcaccctgtttaaaattaatgcaatgggttggtatcgccaggcaccgggtaaacgtcgtgaactggttgcactgattaccagcagcgataccaccgattatgcagatagcgttaaaggtcgctttaccattagccgtgataatagctggaataccgtttatctgcagatgaatagcctgcgtcctgaagataccgcagtttattattgtcacagcgatcattatagcctgggtgtgccggaaaaacgtgttattctgtatggtcaggggaccctggtcaccgtctcctca

SEQ ID NO: 437 - DNA, 1359 bp, Artificial Sequence
  Nanobody sequence
atgagatttccttcaatttttactgctgttttattcgcagcatcctccgcattagctgctccagtcaacactacaacagaagatgaaacggcacaaattccggctgaagctgtcatcggttactcagatttagaaggggatttcgatgttgctgttttgccattttccaacagcacaaataacgggttattgtttataaatactactattgccagcattgctgctaaagaagaaggggtatctctcgaaaagagagaggtgcaattggtggagtctgggggtggtctggttcagcctggtggtagcctgcgtctgagctgtgcagcaagcggttttacctttagcagctatccgatgagctgggttcgtcaggcaccgggtaaaggtcctgaatgggttagcaccgttagtccgggtggaattaccaccagttatgcagatagcgttaaaggtcgttttaccattagccgtgataatagcaaaaataccctgtatctgcagatgaatagcctgcgtcctgaagataccgcagtttattattgtctgcgtgatctgggtaatcgtggtcaggggaccctggtcacggtctcctcaggaggtggcggatccggcggaggtagtgaggtgcagctggtggagtctgggggtggcttggtgcaaccgggtaacagtctgcgccttagctgcgcagcgtctggctttaccttcagctcctttggcatgagctgggttcgccaggctccgggaaaaggactggaatgggtttcgtctattagcggcagtggtagcgatacgctctacgcggactccgtgaagggccgtttcaccatctcccgcgataacgccaaaactacactgtatctgcaaatgaatagcctgcgtcctgaagacacggccgtttattactgtactattggtggctcgttaagccgttcttcacaggggaccctggtcacggtctcctcaggaggtggcgggtccggaggaggtagtgaggtgcagctggtggagtctgggggtggtctggttcagcctggtggtagcctgcgtctgagctgtgcagcaagcggcaccctgtttaaaattaatgcaatgggttggtatcgccaggcaccgggtaaacgtcgtgaactggttgcactgattaccagcagcgataccaccgattatgcagatagcgttaaaggtcgctttaccattagccgtgataatagctggaataccgtttatctgcagatgaatagcctgcgtcctgaagataccgcagtttattattgtcacagcgatcattatagcctgggtgtgccggaaaaacgtgttattctgtatggtcaggggaccctggtcaccgtctcctca

SEQ ID NO: 438 - DNA, 1395 bp, Artificial Sequence
  Nanobody sequence
atgagatttccttcaatttttactgctgttttattcgcagcatcctccgcattagctgctccagtcaacactacaacagaagatgaaacggcacaaattccggctgaagctgtcatcggttactcagatttagaaggggatttcgatgttgctgttttgccattttccaacagcacaaataacgggttattgtttataaatactactattgccagcattgctgctaaagaagaaggggtatctctcgaaaagagagaggtgcaattggtggagtctgggggtggtctggttcagcctggtggtagcctgcgtctgagctgtgcagcaagcggtcgtacctattatctgaatgcaatgggttggtttcgtcaggcaccgggtaaagaacgtgaatttgttgcagccattgattggagcgaaggcaataaagattatgccgatagcgtgaaaggtcgttttaccattagccgtgataacagcaaaaacaccgtttatctgcagatgaatagcctgcgtcctgaagataccgcagtttattattgtgcagcagatacccctccgtggggtccgctgatttatattgaaagctatgatagctggggtcaggggaccctggtcacggtctcctcaggaggtggcggatccggcggaggtagtgaggtgcagctggtggagtctgggggtggcttggtgcaaccgggtaacagtctgcgccttagctgcgcagcgtctggctttaccttcagctcctttggcatgagctgggttcgccaggctccgggaaaaggactggaatgggtttcgtctattagcggcagtggtagcgatacgctctacgcggactccgtgaagggccgtttcaccatctcccgcgataacgccaaaactacactgtatctgcaaatgaatagcctgcgtcctgaagacacggccgtttattactgtactattggtggctcgttaagccgttcttcacaggggaccctggtcacggtctcctcaggaggtggcgggtccggaggaggtagtgaggtgcagctggtggagtctgggggtggtctggttcagcctggtggtagcctgcgtctgagctgtgcagcaagcggcaccctgtttaaaattaatgcaatgggttggtatcgccaggcaccgggtaaacgtcgtgaactggttgcactgattaccagcagcgataccaccgattatgcagatagcgttaaaggtcgctttaccattagccgtgataatagctggaataccgtttatctgcagatgaatagcctgcgtcctgaagataccgcagtttattattgtcacagcgatcattatagcctgggtgtgccggaaaaacgtgttattctgtatggtcaggggaccctggtcaccgtctcctca

SEQ ID NO: 439 - DNA, 1374 bp, Artificial Sequence
  Nanobody sequence
atgagatttccttcaatttttactgctgttttattcgcagcatcctccgcattagctgctccagtcaacactacaacagaagatgaaacggcacaaattccggctgaagctgtcatcggttactcagatttagaaggggatttcgatgttgctgttttgccattttccaacagcacaaataacgggttattgtttataaatactactattgccagcattgctgctaaagaagaaggggtatctctcgaaaagagagaggtgcaattggtggagtctgggggtggtctggttcagcctggtggtagcctgcgtctgagctgtgcagcaagcggcaccctgtttaaaattaatgcaatgggttggtatcgccaggcaccgggtaaacgtcgtgaactggttgcactgattaccagcagcgataccaccgattatgcagatagcgttaaaggtcgctttaccattagccgtgataatagctggaataccgtttatctgcagatgaatagcctgcgtcctgaagataccgcagtttattattgtcacagcgatcattatagcctgggtgtgccggaaaaacgtgttattctgtatggtcaggggaccctggtcacggtctcctcaggaggtggcggatccggcggaggtagtgaggtgcagctggtggagtctgggggtggcttggtgcaaccgggtaacagtctgcgccttagctgcgcagcgtctggctttaccttcagctcctttggcatgagctgggttcgccaggctccgggaaaaggactggaatgggtttcgtctattagcggcagtggtagcgatacgctctacgcggactccgtgaagggccgtttcaccatctcccgcgataacgccaaaactacactgtatctgcaaatgaatagcctgcgtcctgaagacacggccgtttattactgtactattggtggctcgttaagccgttcttcacaggggaccctggtcacggtctcctcaggaggtggcgggtccggaggaggtagtgaggtgcagctggtggagtctgggggtggtctggttcagcctggtggtagcctgcgtctgagctgtgcagcaagcggtagcattggtggtctgaatgcaatggcatggtatcgtcaggcaccgggtaaagaacgtgaactggttgcaggtatttttggtgttggtagcacccgttatgcagatagcgttaaaggtcgttttaccattagccgtgacaatagcaaaaacaccgtttatctgcagatgaatagcctgcgtcctgaagataccgcagtttattattgtcgcatgagcagcgttacccgtggtagcagcgattattggggtcaggggaccctggtcaccgtctcctca

SEQ ID NO: 440 - DNA, 471 bp, Artificial Sequence
  Nanobody sequence
atgaaaaagaccgctatcgcgattgcagtggcactggctggtttggccaccgtggcccaggccgaggtgcaattggtggagtctgggggaggcttggtgcaggctggggggtctctgagactctcctgtgcagcctctggattcaccttcagtagctatcccatgagctgggtccgccaggctccaggaaaggggcccgcgtgggtctcaactgttagtcctggtggtataaccacaagctatgcagactccgtgaagggccgattcaccatctccagagacaacgccaagaacacgctgtatttgcaaatgaacagcctgaaacctgaggacacggccgtgtattactgcttaagagatctgaataataggggccaggggacccaggtcaccgtctcctcagcggccgcagaacaaaaactcatctcagaagaggatctgaatggggccgcacatcatcatcatcatcat

SEQ ID NO: 441 - DNA, 486 bp, Artificial Sequence
  Nanobody sequence
atgaaaaagaccgctatcgcgattgcagtggcactggctggtttggccaccgtggcccaggccgaggtgcaattggtggagtctgggggaggcttggtgcaacctggggggtctctgagactctcctgcgcagcctctggaagcatcggcggtctcaatgccatggcctggtaccgccaggctccaggaaaagagcgcgagttggtcgcaggtatttttggcgttggtagcacgaggtacgcggactccgtgaagggccgattcaccatctctagagacatcgccaagaacacggtgtttctgcaaatgaacagcctgaattctgaggacacggccgtttattactgtcggatgtcaagtgttactcgtggtagttctgactactggggtcaggggacccaggtcaccgtctcctcagcggccgcagaacaaaaactcatctcagaagaggatctgaatggggccgcacatcatcatcatcatcat

SEQ ID NO: 442 - DNA, 498 bp, Artificial Sequence
  Nanobody sequence
atgaaaaagaccgctatcgcgattgcagtggcactggctggtttggccaccgtggcccaggccgaggtgcaattggtggagtctgggggaggcttggtgcagcctggggggtctctgagactctcctgtgcagcctctggaacgctcttcaaaatcaacgccatgggctggtaccgccaggctccagggaagcggcgcgagttggtcgcacttattactagtagcgatacaacggattatgcagagtccgtggagggccgattcaccatctccagagacaacacgtggaacgcggtgtatctgcaaatgaacagtctgaaacctgaggatacggccgtctattactgtcactcagatcattactcgatgggtgtgcctgaaaagcgagtcataatgtacggccaggggacccaggtcaccgtctcctcagcggccgcagaacaaaaactcatctcagaagaggatctgaatggggccgcacatcatcatcatcatcat

SEQ ID NO: 443 - DNA, 507 bp, Artificial Sequence
  Nanobody sequence
atgaaaaagaccgctatcgcgattgcagtggcactggctggtttggccaccgtggcccaggccgaggtgcaattggtggagtctgggggaggattggtgcaggctgggggctctctgagactctcctgtgcagcctctggacgcacgtactatctcaatgccatgggctggttccgccagggtccagggaaggaccgtgagtttgtagcagctatagactggagtgatggtaacaaagactatgcagactccgtgaagggccgattcaccatctccagagacaacgccaagaacacggtgtatctgcaaatgaacagcctgaaacctgaggacacggccgtttattactgtgcagccgacacaccaccctgggggcctatgatctacatcgaatcgtatgactcctggggccaggggacccaggtcaccgtctcctcagcggccgcagaacaaaaactcatctcagaagaggatctgaatggggccgcacatcatcatcatcatcat

SEQ ID NO: 444 - DNA, 492 bp, Artificial Sequence
  Nanobody sequence
atgaaaaagaccgctatcgcgattgcagtggcactggctggtttggccaccgtggcccaggccgaggtgcaattggtggagtctgggggaggcttggtgcagcctggggggtctctgggactctcctgtgtagcctctggaagcatcttcagaatcaatgccatggcctggtaccgccaggctccagggaagcagcgcgagttggtcgcggaaattactgctggtggtagcacaaactatgcagactccgtgaagggccgattcaccatctccgtagacaacgcctggaacacgctgtatctgcaaatgaacagcctgaaagttgaggacacggccgtctattactgtaatctagatcattatacgacatgggatagacggagtgcctactggggccaggggacccaggtcaccgtctcctcagcggccgcagaacaaaaactcatctcagaagaggatctgaatggggccgcacatcatcatcatcatcat

1-32. (canceled)

33. A protein or polypeptide comprising at least two immunoglobulin single variable (ISV) domains that are each directed to and/or that can each specifically bind to human HER3 (SEQ ID NO: 1), in which each such ISV domain is independently:
(a) capable of inhibiting or blocking binding of HRG to HER-3; and/or
(b) capable of inhibiting or blocking heterodimerization of HER-3; and/or
(c) capable of binding to domain II of HER-3.

34. The protein or polypeptide according to claim 33, comprising:
(a) at least one ISV domain capable of inhibiting or blocking heterodimerization of HER-3; and
(b) at least one ISV domain capable of inhibiting or blocking the binding of HRG to HER-3.

35. The protein or polypeptide according to claim 33, comprising:
(a) at least one ISV domain capable of inhibiting or blocking heterodimerization of HER-3; and
(b) at least one ISV domain capable of binding to domain II of HER-3.

36. The protein or polypeptide according to claim 33, in which the ISV domain capable of binding to domain II of HER-3 is capable of inhibiting or blocking HER-3 transphosphorylation.

37. The protein or polypeptide comprising at least two immunoglobulin single variable (ISV) domains that are each directed to and/or that can each specifically bind to human HER3 (SEQ ID NO: 1), in which each such ISV domain independently comprises:
(a) 21F06-like sequences,
(b) 04C07-like sequences,
(c) 17B05-like sequences,
(d) 18G11-like sequences, and/or
(e) 34C07-like sequences.

38. The protein or polypeptide according to claim 37, comprising:
(a) at least one ISV domain comprising a 17B05-like sequence; and
(b) at least one ISV domain comprising a 21F06-like sequence.

39. The protein or polypeptide according to claim 37, comprising:
(a) at least one ISV domain comprising a 17B05-like sequence; and
(b) at least one ISV domain comprising a 18G11-like sequence.

40. The protein or polypeptide according to claim 33, further functionalized to have an increased half-life, for example by functionalisation and/or by including in the protein or polypeptide a moiety or binding unit that increases the half-life of the construct.

41. The protein or polypeptide according to claim 33, wherein the functionalization comprises (i) including a moiety or binding unit; and/or (ii) including a peptide or binding unit that can bind to a serum protein.

42. The protein or polypeptide according to claim 33, comprising an ISV domain directed to human serum albumin.

43. The protein or polypeptide according to claim 33, selected from the group consisting of SEQ ID NOs 147-327.

44. The protein or polypeptide according to claim 43, selected from the group consisting of SEQ ID NO:282, SEQ ID NO:319 SEQ ID NO:322.

45. The protein or polypeptide according to claim 33, wherein the amino acid sequences of the ISV domains are independently chosen from the group consisting of SEQ ID NOs 12 to 26.

46. The protein or polypeptide according to claim 33, wherein the amino acid sequences of the ISV domains are independently chosen from the group consisting of SEQ ID NO: 13, SEQ ID NO: 15, SEQ ID NO: 16, SEQ ID NO: 18 or SEQ ID NO:22.

47. The protein or polypeptide according to claim 33, in which at least one of the CDR1, CDR2 and CDR3 sequences of the ISV domains have at least 90% amino acid identity with the CDR1, CDR2, and CDR3 sequences of at least one of the immunoglobulin single variable domains of SEQ ID NOs: 12 to 26.

48. The protein or polypeptide according to claim 33, wherein the ISV domain:
i) has at least 80% amino acid identity with at least one of the immunoglobulin single variable domains of SEQ ID NO's: 12 to 26, in which for the purposes of determining the degree of amino acid identity, the amino acid residues that form the CDR sequences are disregarded; and in which:
ii) optionally, one or more of the amino acid residues at positions 11, 37, 44, 45, 47, 83, 84, 103, 104 and 108 according to the Kabat numbering are chosen from the Hallmark residues mentioned in Table B-2.

49. An immunoglobulin single variable (ISV) domain directed against and/or that can specifically bind to human HER3 (SEQ ID NO: 1).

50. The ISV domain according to claim 47, capable of inhibiting or blocking the binding of HRG to HER-3.

51. The ISV domain according to claim 47, chosen from the group consisting of 21F06-like sequences and 04C07-like sequences.

52. The ISV domain according to claim 47, capable of inhibiting or blocking heterodimerisation of HER-3.

53. The ISV domain according to claim 47, chosen from the group consisting of 17B05-like sequences.

54. The ISV domain according to claim 51, capable of inhibiting or blocking HER-3 transphosphorylation.

55. The ISV domain according to claim 47, capable of binding to domain II of HER-3.

56. The ISV domain according to claim 47, capable of inhibiting or blocking HER-3 phosphorylation.

57. The ISV domain according to claim 47, chosen from the group consisting of 18G11-like sequences and the 34C07-like sequences.

58. The ISV domain according to claim 47, essentially consisting of a polypeptide that:
i) has at least 80% amino acid identity with at least one of the ISV domains of SEQ ID NO's: 12 to 26, in which for the purposes of determining the degree of amino acid identity, the amino acid residues that form the CDR sequences are disregarded; and in which:
ii) optionally, one or more of the amino acid residues at positions 11, 37, 44, 45, 47, 83, 84, 103, 104 and 108 according to the Kabat numbering are chosen from the Hallmark residues mentioned in Table B-2.

59. A protein or polypeptide competing with a protein, polypeptide or ISV according to claim 33 for binding to HER3 (SEQ ID NO: 1).

60. A nucleic acid encoding a protein or polypeptide or ISV according to claim 33.

61. A pharmaceutical composition comprising a protein or polypeptide or ISV according to claim 33.

62. A method of treatment of cancer or of a disease related to nerve regeneration comprising administering to a patient in need thereof an efficient amount of a protein or polypeptide or ISV according to claim 33.

63. The method according to claim 62, wherein the cancer is breast cancer, lung cancer, ovarian cancer, prostate cancer, urinary bladder cancer, brain cancer, retinoblastoma, melanoma, colorectal cancer, pancreatic cancer, gastric cancer, head and neck cancer, cervix cancer, and/or esophagus cancer.
